(19) United States
(12) Patent Application Publication
(10) Pub. No.: US 2012/0244166 A1
(43) Pub. Date: Sep. 27, 2012

(54) NEUTRALIZING ANTIBODIES TO HIV-1 AND THEIR USE

(75) Inventors: John R. Mascola, Rockville, MD (US); Richard T. Wyatt, San Diego, CA (US); Xueling Wu, Potomac, MD (US); Yuxing Li, Boyds, MD (US); Carl-Magnus Hogerkorp, Vellinge (SE); Mario Roederer, Washington, DC (US); Zhi-yong Yang, Potomac, MD (US); Gary J. Nabel, Washington, DC (US); Peter D. Kwong, Washington, DC (US); Tongqing Zhou, Boyds, MD (US); Mark Connors, Bethesda, MD (US); Gilad Ofek, Washington, DC (US); Lawrence Shapiro, Bethesda, MD (US); Jiang Zhu, Ashburn, VA (US); William R. Schief, Encinitas, CA (US)

(73) Assignees: Human Services and University of Washington; The United States of America, as represented by the Secretary, Department of Health and

(21) Appl. No.: 13/429,279

(22) Filed: Mar. 23, 2012

Related U.S. Application Data
(63) Continuation-in-part of application No. PCT/US2010/050295, filed on Sep. 24, 2010.
(60) Provisional application No. 61/385,531, filed on Sep. 22, 2010.
(60) Provisional application No. 61/402,314, filed on Aug. 27, 2010.
(60) Provisional application No. 61/346,808, filed on May 20, 2010.
(60) Provisional application No. 61/290,135, filed on Dec. 24, 2009.
(60) Provisional application No. 61/252,613, filed on Oct. 16, 2009.
(60) Provisional application No. 61/246,039, filed on Sep. 25, 2009.

(51) Int. Cl. A61K 39/395; C12N 15/63; C12N 1/21; C12N 1/19; A61P 31/18; C12N 15/74; G01N 21/64; C07K 16/10; C12N 15/13; C12N 9/96; C12N 5/10

(52) U.S. Cl. 424/142.1; 435/188; 435/320.1; 435/252.33; 435/252.3; 435/252.35; 435/252.31; 435/254.2; 435/339.1; 435/5; 436/501; 530/388.15; 530/387.3; 530/391.3; 536/23.53

(57) ABSTRACT

Monoclonal neutralizing antibodies are disclosed that specifically bind to the CD4 binding site of HIV-1 gp120. Monoclonal neutralizing antibodies also are disclosed that specifically bind to HIV-1 gp41. The identification of these antibodies, and uses of these antibodies, are also disclosed. Methods are also provided for enhancing the binding and neutralizing activity of any antibody using epitope scaffold probes.

### CROSS REFERENCE TO RELATED APPLICATIONS

[0001] This is a continuation-in-part of International Application No. PCT/US2010/050295, filed Sep. 24, 2010, which in turn claims the benefit of U.S. Provisional Application No. 61/385,531, filed Sep. 22, 2010, U.S. Provisional Application No. 61/402,314, filed Aug. 27, 2010, U.S. Provisional Application No. 61/346,808, filed May 20, 2010, U.S. Provisional Application No. 61/290,135, filed Dec. 24, 2009, U.S. Provisional Application No. 61/252,613, filed Oct. 16, 2009, and U.S. Provisional Application No. 61/246,039, filed Sep. 25, 2009. All of the prior applications are specifically incorporated by reference in their entirety.

### FIELD OF THE DISCLOSURE

[0002] This relates to monoclonal neutralizing antibodies that bind to the CD4 binding site of HIV-1 gp120 or to HIV-1 gp41, their identification, and their use.

### BACKGROUND

[0003] An effective HIV-1 vaccine will likely need to induce neutralizing antibodies (NAbs) that block HIV-1 entry into human cells. To be effective, vaccine induced antibodies will have to be active against most circulating strains of HIV-1. Unfortunately, current HIV-1 vaccines are unable to induce potent and broadly reactive NAbs. One major obstacle to the design of better vaccines is the limited understanding of what region of the HIV-1 envelope glycoproteins (gp120 and gp41) are recognized by NAbs. A few neutralizing monoclonal antibodies (mAbs) have been isolated from HIV-1 infected individuals and these mAbs define specific regions (epitopes) on the virus that are vulnerable to NAbs.

[0004] One previously characterized HIV-1 neutralizing mAb, called b12, can bind to a site on gp120 that is required for viral attachment to its primary cellular receptor, CD4. Another previously characterized HIV-1 neutralizing mAb, called 2F5, can bind to a site on gp41. mAb b12 was derived from a phage display library, a process which makes it impossible to know if the antibody was naturally present in an infected person, or was the result of a laboratory combination of antibody heavy and light chains. b12 can neutralize about 75% of clade B strains of HIV-1 (those most common in North America), but it neutralizes less than 50% of other strains of HIV-1 found worldwide. Prior attempts to design a vaccine that induces NAbs similar to b12 have been unsuccessful. Therefore, there is a need to develop Nabs for HIV-1.

### SUMMARY OF THE DISCLOSURE

[0005] Isolated human monoclonal neutralizing antibodies that specifically bind HIV-1 gp120 or gp41 are provided herein. Also disclosed herein are compositions including these antibodies that specifically bind gp120- or gp41-nucleic acids encoding these antibodies, expression vectors comprising the nucleic acids, and isolated host cells that express the nucleic acids. In some embodiments, the heavy chain of the isolated human monoclonal antibody includes amino acids 26-33 (complementarity-determining region 1 (CDR1)), 51-58 (CDR2), and 97-110 (CDR3) of SEQ ID NO: 1, wherein the antibody specifically binds gp120 of HIV-1, and wherein the antibody is neutralizing. In other embodiments, the heavy chain of the isolated human monoclonal antibody includes amino acids 26-35 (CDR1), 50-66 (CDR2), and 106-119 (CDR3) of SEQ ID NO: 27, wherein the antibody specifically binds gp120 of HIV-1, and wherein the antibody is neutralizing. In other embodiments, the heavy chain of the isolated human monoclonal antibody includes CDR1, CDR2, and CDR3 of any one of SEQ ID NOs: 760-1459, wherein the antibody specifically binds gp120 of HIV-1, and wherein the antibody is neutralizing. In still other embodiments, the heavy chain of the antibody includes SEQ ID NO: 5, wherein one or more of amino acids 106, 107, or 109 of SEQ ID NO: 5 are substituted with a tryptophan, and wherein the antibody specifically binds gp41 of HIV-1 and is neutralizing.

[0006] The antibodies and compositions disclosed herein can be used for a variety of purposes, such as for detecting an HIV-1 infection or diagnosing AIDS in a subject. These methods can include contacting a sample from the subject diagnosed with HIV-1 or AIDS with a human monoclonal antibody that specifically binds gp120 or gp41, and detecting binding of the antibody to the sample. An increase in binding of the antibody to the sample relative to binding of the antibody to a control sample confirms that the subject has an HIV-1 infection and/or AIDS. In some embodiments, the methods further comprise contacting a second antibody that specifically binds gp120 or gp41 with the sample, and detecting binding of the second antibody. In some non-limiting examples an increase in binding of the antibody to the sample relative to a control sample detects HIV-1 in the subject. In some non-limiting examples, the antibody specifically binds soluble gp120 in the sample. In some embodiments, the methods further comprise contacting a second antibody that specifically recognizes the 120- or gp41-specific antibody with the sample and detecting binding of the second antibody.

[0007] In additional embodiments, a method is disclosed for treating a subject with an HIV infection, such as, but not limited to, a subject with AIDS. The methods include administering a therapeutically effective amount of a human gp120 or gp41 specific monoclonal antibody to the subject.

[0008] The foregoing and other features and advantages of this disclosure will become more apparent from the following detailed description of a several embodiments which proceeds with reference to the accompanying figures.

### BRIEF DESCRIPTION OF THE FIGURES

[0009] FIGS. 1A-1E are a set of surface representations and graphs showing the design and antigenic profile of RSC3 and analysis of epitope-specific neutralization. FIG. 1A is a surface structure model of the RSC3. The outer domain contact site for CD4 is highlighted in light grey. Regions highlighted dark are antigenically resurfaced areas, shown both on the inner (left panel) and outer (right panel) faces of the core protein. Glycans are shown in medium grey. FIG. 1B is a set of graphs showing the antigenicity of the RSC3 protein based on enzyme-linked immunosorbent assay (ELISA) using the neutralizing CD4bs mAb b12 and CD4-Ig fusion protein. mAb 2G12 was used to confirm the structural integrity of the protein. FIG. 1C is a set of graphs showing the results of kinetic binding analysis in which mAb b12 was immobilized on the sensor chip for surface plasmon resonance (SPR) kinetic binding analysis with the proteins shown. FIG. 1D is a set of graphs showing the RSC3 blockade of HIV-1 viral strain HXB2 neutralization by the broadly neutralizing CD4bs mAb b12, but not CD4bs mAb F105, which has limited neutralization breadth. The V3 neutralizing mAb 447-52D is shown as a control. FIG. 1E is a set of bar graphs showing the analysis of serum 45 neutralization of a panel of 17 viruses, using RSC3 and ΔRSC3 to block neutralization activity. The percent reduction in the serum ID50 caused by competition with RSC3 or ΔRSC3 is shown on the Y-axis (+/−SEM of three independent experiments). Viral strains and clades are shown on the X-axis. Values less than 20% were not considered significant in this assay.

[0010] FIGS. 2A-2C are a set of dot plots and graphs showing isolation of individual CD4bs-directed memory B cells by cell sorting, and binding characterization of isolated mAbs. FIG. 2A is a set of dot plots of flow cytometry data showing the results of twenty-five million peripheral blood mononuclear cells (PBMC) from donor 45 that were incubated with biotin-labeled RSC3 and ΔRSC3 complexed with SA-APC and SA-PE respectively, prior to addition to cells. Memory B cells were selected based on the presented gating strategy. Twenty-nine B cells that reacted with RSC3 and not ΔRSC3 (representing 0.05% of all memory B cells) were sorted into individual wells of a 96 well plate containing lysis buffer. FIG. 2B is a set of graphs of the results of an ELISA antigen binding profile of three isolated mAbs, VRC01, VRC02 and VRC03. Solid lines show mAb binding to RSC3 (left panel) and YU2 gp120 (right panel). Dashed lines indicate binding to ΔRSC3 (left) or to the CD4bs knockout mutant of gp120, D368R (right). FIG. 2C is a set of graphs of the SPR binding analysis of VRC01 reacted with RSC3 and ΔRSC3. VRC01 was captured with an anti-human IgG-Fc antibody that was immobilized on the sensor chip.

[0011] FIGS. 3A and 3B are a set of graphs and a table showing the antigenic and biophysical characterization of novel CD4bs-directed mAbs. FIG. 3A is a set of graphs of results of competition ELISA performed with a single concentration of biotin-labeled VRC01 (left) or the co-receptor binding mAb 17b (right). The mAbs indicated near each line were titrated into the ELISA at increasing concentrations to evaluate the effect on VRC01 and 17b binding, respectively. FIG. 3B is a table showing the results of isothermal titration calorimetry (ITC) used to assess the change in enthalpy (ΔH) and entropy (−TΔS) upon binding of mAbs to YU2 gp120. Each measured value is shown +/−SEM.

[0012] FIG. 4 is set phylogenetic trees showing the analysis of neutralization by mAbs VRC01 and b12 against a panel of 190 Env pseudoviruses representing all major circulating clades of HIV-1. Dendrograms, made by the neighbor-joining method, show the protein distance of gp160 sequences from 190 HIV-1 primary isolates. The clade B reference strain HXB2 was used to root the tree, and the amino acid distance scale is indicated with a value of 1% distance as shown. The clades of HIV-1 main group, including circulating recombinant forms (CRFs), are indicated. The data under the dendrograms show the percent of viruses neutralized with an IC50<50 μg/ml, and <1 μg/ml, and the geometric mean IC50 value for viruses neutralized with an IC50<50 μg/ml.

[0013] FIG. 5A is a schematic drawing showing an algorithm of structure-based design of the resurfaced core proteins. The design intent was to resurface non-CD4bs regions of the core protein, and to maintain the b12 contact surface while abrogating CD4 binding.

[0014] FIG. 5B is a protein sequence alignment of the resurfaced proteins and the HIV-1 HXB2 core or stabilized core (Ds12F123), which provided the framework for the resurfaced protein designs. Residue positions are marked according to the HXB2 sequence. Highlighted are amino acid substitutions made in the resurfaced proteins in comparison to the original HXB2 core or stabilized core sequences. Gaps are indicated as “-”.

[0015] FIG. 6 is a table showing the design and expression of resurfaced core (RC) and resurfaced stabilized core (RSC) glycoproteins, and summary of antigenic reactivity. A panel of 8 resurfaced proteins with different degrees of resurfacing were designed and tested. The surface structural model of each resurfaced protein is shown. Each protein was analyzed for binding to CD4-Ig, b12 and 2G12. 2G12 binding was used as a marker of conformational integrity of the purified protein. ELISA binding activity was categorized as strong (+++), moderate (++), weak (+) or negative (−). RSC3, used subsequently to isolate mAbs, was 31.3% antigenically resurfaced and maintained strong binding to b12.

[0016] FIG. 7 is a table showing the results of binding to RSC3 protein by a panel of neutralizing sera. Fifteen clade B sera with moderate to broad neutralizing activity were evaluated by ELISA for binding to RSC3 and ΔRSC3. Neutralization of five viral isolates is shown; the clade of each virus is indicated in parenthesis. Neutralization ID50 values greater than 1000 are highlighted in dark boxes; values between 100-1000 are highlighted in light boxes. ELISA binding was categorized as strong (+++), moderate (++), weak (+) or negative (−). Preferential binding to RSC3, compared to ΔRSC3, is evidence of CD4bs directed antibodies in the sera. Donor 45 was chosen for additional serum analysis, and eventually for isolation of mAbs.

[0017] FIG. 8 is a set of graphs showing the comparison of VRC01 and b12 binding kinetics by surface plasmon resonance (SPR). The mAbs were captured with a mouse anti-human IgG Fc antibody that was immobilized onto the chip matrix. The binding kinetics of ligands RSC3, ΔRSC3, stabilized core and full-length YU2 gp120 were analyzed.

[0018] FIG. 9 is a set of graphs showing the VRC02 and VRC03 binding kinetics by SPR. The mAbs were captured with a mouse anti-human IgG Fc antibody that was immobilized onto the chip matrix. The binding kinetics of ligands RSC3, ΔRSC3, stabilized core and full-length YU2 gp120 were analyzed.

[0019] FIG. 10A is a table showing a gene family analysis of VRC01, VRC02, VRC03 and b12. The VH and VK mutation frequency was calculated from the mutated nucleotides. Mean values from three normal donors consisted of 120 IgD+CD27+ and 97 IgDCD27+ sequences for heavy chain analysis and 167 mutated IgM+ sequences for kappa analysis are shown. A specific D gene could not be determined since the germline genes with the greatest homology (IGHD3/OR15-3, IGHD3-22 or IGHD3-16) each contained a mutation within a matching length of less than 11 nucleotides and the orphan IGHD3/OR15-3 gene on chromosome 15 cannot contribute to Ig chain synthesis; bIGHJ2*01 is an alternative possibility based on the third complementarity determining region 3 (CDR3) sequence analysis; cIGKV3-NL1*01 (NL=Not Located) showed greater homology than IGKV3-11*01 by one nucleotide; dIGKV3-NL5*01 showed greater homology than IGKV3-20*01 by one nucleotide.

[0020] FIG. 10B is sequence alignment of the deduced amino acid sequences of the variable regions of VRC01 (heavy chain, SEQ ID NO: 1; light chain, SEQ ID NO: 2), VRC02 (heavy chain, SEQ ID NO: 3; light chain, SEQ ID NO: 4) and VRC03 (heavy chain, SEQ ID NO: 27; light chain, SEQ ID NO: 28). Framework (FR) and CDRs are indicated above the sequence alignment. The top sequence in each group represents the deduced germline sequence with identity to the expressed VH1, D3, JH1, VK3 and JK2 genes. VRC01, VRC02 and VRC03 were derived from the same VH germline gene (IGHV1-02*02, SEQ ID NOs: 41, 42), hence all 3 mAbs are aligned to this sequence. VRC01 and VRC02 are somatic variants of each other (they have the same V-D-J recombination). The arrow marks the position of a 7 amino acids insertion (QLSQDPD, SEQ ID NO: 27) in the VRC03 heavy chain FR3 region. A common motif is underlined in the heavy chain CDR1 (GYXFXD, SEQ ID NO: 27), CDR2 (KPXXGAV, SEQ ID NO: 27) and CDR3 (CDYXXDF, SEQ ID NO: 27). VRC01 and VRC02 have the same VK gene (IGKV3-11*01, SEQ ID NO: 42). While the closest inferred germline sequence match for VRC03 was IGKV3-20*01 (SEQ ID NO: 43), IGKV3-11*01 was also a close match. The dot symbol marks an amino acid deletion in the VK CDR1.

[0021] The arrows mark the position of a 2 amino acids insertion (VQ) in VRC01 and VRC02 FR4 (JK gene). Light residues indicate replacement substitutions compared to germline sequence.

[0022] FIG. 11A is two graphs showing the results of competition ELISA performed with a single concentration (50 ng/ml) of biotinylated VRC02 or VRC03 binding to YU2 gp120. The unlabeled competing mAbs were titrated into the ELISA at increasing concentrations to evaluate the effect on VRC02 and VRC03 binding respectively.

[0023] FIG. 11B are three graphs showing the results of competition ELISA performed with a single concentration (50 ng/ml) of biotinylated VRC01, VRC02 or VRC03 binding to RSC3. The unlabeled competing mAbs were limited to those that showed binding to RSC3.

[0024] FIG. 11C is a graph showing the results of analysis of gp120 binding to cell surface expressed CCR5 by flow cytometry. Biotinylated gp120 at 5 μg/ml was used to stain the human CCR5 expressing canine thymus cell line, Cf2Th/syn CCR5. Prior to cell staining, biotinylated gp120 was incubated with CD4-Ig or mAbs VRC01, VRC03 or b12 with serial concentrations ranging from 0.04-25 μg/ml. Binding of gp120 was detected by streptavidin-APC and FACS analysis. Note that CD4-Ig and VRC01 enhanced gp120 binding to CCR5, while mAbs b12 and VRC03 did not.

[0025] FIGS. 12A and 12B are a set of graphs showing analysis of the effect of VRC01 on the functional viral spike. FIG. 12A is a set of graphs showing the neutralization of JRFL that was performed with the mAbs shown in the legend. Antibody 447-52D is directed to the V3 region of gp120, and mAbs 17b and vc813 DB are directed to the co-receptor binding region of gp120. Graphs show the effect on neutralization as sCD4 (left panel) or VRC01 (right panel) were added to the assay. The adjusted neutralization was calculated using the baseline of viral entry at each concentration of sCD4 or VRC01. In contrast to sCD4, VRC01 did not enhance the neutralization by mAbs 447-52D, 17b and vc813 DB. FIG. 12B is a set of graphs showing JRFL entry into the CCR5+/CD4-cell line, Cf2Th/syn CCR5. CD4-Ig and sCD4 (left panel) promote entry of JRFL into CD4 negative cells. VRC01 (right panel) did not promote viral entry. Each infection was performed in triplicate, and the mean and standard error are shown.

[0026] FIGS. 13A and 13B are a table and a graph showing correlation analysis of neutralization by serum 45 IgG and mAb VRC01. FIG. 13A is a contingency table showing neutralization by serum 45 IgG and mAb VRC01. Fisher's exact test demonstrated a strong association between the number of viruses neutralized by serum 45 IgG and mAb VRC01. Serum 45 IgG sensitive was defined as an IC50<1000 μg/ml. VRC01 sensitivity was defined as an IC50 <50 μg/ml. FIG. 13B is a graph of a deming regression analysis of log transformed IC50 values of viruses neutralized by both VRC01 and serum 45 IgG. This showed a strong association between the potency of serum 45 IgG and mAb VRC01. The slope of the regression line is 0.68 (95% CI 0.07). Thus, while VRC01 accounts for a substantial portion of total serum 45 IgG neutralization, the slope of less than 1.0 suggests that VRC01 does not account for all serum 45 IgG neutralization activity.

[0027] FIG. 14 is Table S1 showing the ELISA binding profiles of VRC01, VRC02, and VRC03 compared to a panel of known mAbs.

[0028] FIG. 15 is Table S2a showing a summary of the breath and potency of antibody neutralization against 190 HIV-1 Env-pseudoviruses.

[0029] FIG. 16 is Table S2b showing antibody neutralization data against 22 HIV-1 clade A HIV-1 Env-pseudoviruses.

[0030] FIG. 17 is Table S2c showing antibody neutralization data against 49 HIV-1 clade B HIV-1 Env-pseudoviruses.

[0031] FIG. 18 is Table S2d showing antibody neutralization data against 38 HIV-1 clade C HIV-1 Env-pseudoviruses.

[0032] FIG. 19 is Table S2e showing antibody neutralization data against 8 HIV-1 clade D HIV-1 Env-pseudoviruses.

[0033] FIG. 20 is Table S2f showing antibody neutralization data against 18 HIV-1 CRF01_AE Env-pseudoviruses.

[0034] FIG. 21 is Table S2g showing antibody neutralization data against 16 HIV-1 CRF02_AG Env-pseudoviruses.

[0035] FIG. 22 is Table S2h showing antibody neutralization data against 10 HIV-1 clade G Env-pseudoviruses.

[0036] FIG. 23 is Table S21 showing antibody neutralization data against 11 HIV-1 CRF07_BC Env-pseudoviruses.

[0037] FIG. 24 is Table S2j showing antibody neutralization data against 18 Env-pseudoviruses.

[0038] FIG. 25 is Table S3 showing IC50 titers (μg/ml) of antibody neutralization against selected HIV-1 clade B and C viruses using Env-pseudoviruses to infect TZM-bl or activated PBMC, and using PBMC derived uncloned primary isolates to infect TZM-bl or activated PBMC.

[0039] FIG. 26 is an electronic image of a depiction of the structure of antibody VRC01 in complex with HIV-1 gp120. Atomic-level details for broad and potent recognition of HIV-1 by a natural human antibody are depicted with polypeptide chains in ribbon representations. Both light and heavy chains of VRC01 interact with gp120: the primary interaction surface is provided by the CDR H2, with the CDR L1 and L3 and the CDR H1 and H3 providing additional contacts.

[0040] FIGS. 27A-27D are a set of electronic images depicting the structural mimicry of CD4 interaction by antibody VRC01. VRC01 shows how a double-headed antibody can mimic the interactions with HIV-1 gp120 of a single-headed member of the immunoglobulin superfamily such as CD4. FIG. 27A is a comparison of HIV-1 gp120 binding to CD4 (N-terminal domain) and VRC01 (heavy chain-variable domain). Polypeptide chains are depicted in ribbon representation for the VRC01 complex (right) and the CD4 complex with the lowest gp120 RMSD (left). Immunoglobulin domains are composed of two β-sheets, and the top sheet of both ligands is labeled with the standard immunoglobulin-strand topology (strands G, F, C, C′, C″). Close-ups are shown of critical interactions between the CD4-binding loop and the C′″ strand as well as between Asp368gp120 and either Arg59CD4 or Arg71VRC01. Atoms from which hydrogen bonds extend are depicted in stick representation. In the left panel of C, the β15-strand of gp120 is depicted to aid comparison with FIG. 27B, though because of the poor hydrogen-bond geometry, it is only a loop. FIG. 27D shows the comparison of VRC01- and CD4-binding orientations. When the heavy chain of VRC01 is superimposed onto CD4 in the CD4-gp120 complex, the position assumed by the light chain evinces numerous clashes with gp120 (left). The VRC01— binding orientation (right) avoids clashes by adopting an orientation rotated by 43° and translated by 6-Å.

[0041] FIGS. 28A-28C are a dendrogram, a bar graph, and a set of graphs showing structural basis of antibody VRC01 neutralization breadth and potency. VRC01 displays remarkable neutralization breadth and potency, a consequence in part of its ability to bind well to different conformations of HIV-1 gp120. FIG. 28A shows neutralization dendrograms. The genetic diversity of current circulating HIV-1 strains is displayed as a dendrogram, with locations of prominent clades (e.g. A, B and C) and recombinants (e.g., CDR02_AG) labeled. VRC01 neutralizes 72% of the tested HIV-1 isolates with an IC80 of less than 1 ug/ml; by contrast, CD4 neutralizes 30% of the tested HIV-1 isolates with an IC80 of less than 1 ug/ml. FIG. 28B shows a comparison of binding affinities. Binding affinities (KDs) for VRC01 and various other gp120-reactive ligands as determined by surface-plasmon resonance are shown on a bar graph. White bars represent affinities for gp120 restrained from assuming the CD4-bound state and black bars represent affinities for gp120 fixed in the CD4-bound state. Binding too weak to be measured accurately is shown as with an asterisk and bar at 10⁻⁵ M KD. FIG. 28C shows the neutralization of viruses with altered sampling of the CD4-bound state. Mutant S375Wgp120 favors the CD4-bound state, whereas mutants H66Agp120 and W69Lgp120 disfavor this state. Neutralization by VRC01 (left) is similar for wild-type (WT) and all three mutant viruses, whereas neutralization by CD4 (right) correlates with the degree to which gp120 in the mutant viruses favors the CD4-bound state.

[0042] FIGS. 29A-29D are electronic images depicting the natural resistance to antibody VRC01. VRC01 precisely targets the CD4-defined site of vulnerability on HIV-1 gp120. Its binding surface, however, extends outside of the target site, and this allows for natural resistance to VRC01 neutralization. FIG. 29A shows the target site of vulnerability. The CD4-defined site of vulnerability is the initial contact surface of the outer domain of gp120 for CD4 and comprises only two-thirds of the contact surface of gp120 for CD4. The view shown here is rotated 90° about the horizontal from the view in FIGS. 26 and 27. FIG. 29B shows VRC01 recognition. The variable domains of VRC01 are shown in ribbon representation. FIG. 29C shows antigenic variation. FIG. 29D, shows a molecular surface of VRC01 and select interactive loops of gp120. Variation at the tip of the V5 loop is accommodated by a gap between heavy and light chains of VRC01.

[0043] FIGS. 30A-30D are a set of electronic images, bar graphs and graphs depicting the unusual VRC01 features. The structure of VRC01 displays a number of unusual features, which if essential for recognition might inhibit the elicitation of VRC01-like antibodies. In FIG. 30A-30D, unusual features of VRC01 are shown structurally (far left panel), in terms of frequency as a histogram with other antibodies (second panel from left), and in the context of affinity and neutralization measurements after mutational alteration (right two panels). Affinity measurements were made by ELISA to the gp120 construct used in crystallization (93TH057), and neutralization measurements were made with a clade A HIV-1 strain Q842.d12. FIG. 30A shows N-linked glycosylation. The conserved tri-mannose core is shown with observed electron density, along with frequency and effect of removal on affinity. FIG. 30B shows an extra disulfide. Variable heavy domains naturally have two Cys, linked by a disulfide; VRC01 has an extra disulfide linking CDR H1 and H3 regions. This occurs rarely in antibodies, but its removal by mutation to Ser/Ala has little effect on affinity. FIG. 30C shows CDR L1 deletion. A two amino acid deletion in the CDR L1, prevents potential clashes with loop D of gp120. Such deletions are rarely observed; reversion to the longer loop may have a 10-100-fold effect on gp120 affinity. FIG. 30D shows the somatically altered contact surface. The far left panel shows the VRC01 light chain and heavy chain. Residues altered by affinity maturation are depicted with “balls” and contacts with HIV-1 gp120 are colored red. About half the contacts are altered during the maturation process. Analysis of human antibody-protein complexes in the protein-data bank shows this degree of contact surface alteration is rare; reversion of each of the contact site to genome has little effect though in aggregate the effect on affinity is larger.

[0044] FIGS. 31A-31B are a set of graphs showing somatic maturation and VRC01 affinity. Hypermutation of the variable domain during B cell maturation allows for the evolution of high affinity antibodies. With VRC01 this enhancement to affinity occurs principally through the alteration of non-contact residues, which appear to reform the genomic contact surface from affinity too low to measure to a tight (nM) interaction. FIG. 31A shows the effect of genomic reversions. The VH- and VK-derived regions of VRC01 were reverted to the sequences of their closest genomic precursors, expressed as immunoglobulins and tested for binding as VH- and VK-revertants (gHgL), as a VH-only revertant (gH), or as a VK-only revertant (gL) to the gp120 construct used in crystallization (93TH057) or to a stabilized HXBc2 core. These constructs were also tested for neutralization of a clade A HIV-1 strain Q842.d12. FIG. 31B shows maturation of VRC01 and correlation with binding and neutralization. Affinity and neutralization measurements for the 19 VRC01 mutants created during the structure-function analysis of VRC were analyzed in the context of their degree of affinity maturation. Significant correlations were observed, with extrapolation to VH- and VK-genomic revertants suggesting greatly reduced affinity for gp120.

[0045] FIG. 32 is a gp120 sequence alignment and residue-by-residue contacts with CD4 and VRC01. Both wild type clade B HXBc2 (SEQ ID NO: 44) and clade A/E 93TH057 core gp120 sequences (SEQ ID NO: 45) are displayed with HXBc2 numbering convention. The 93TH057 construct has shorter V1/V2 stem and has a new V3 stem. gp120 contacts are defined with the program PISA for the CD4 and VRC01 complexes, with open circles (◯)denoting gp120 main-chain-only contacts, open circles with rays (¤)denoting gp120 side-chain-only contacts, and filled circles () denoting both main-chain and side-chain contacts. The major structure elements of gp120 that involved in ligand binding were underlined. Potential glycosylation sites on gp120 with signature sequence NXT/S are highlighted in cyan, however, not all sites are observed in the crystal structure. VRC01 has remarkably less interactions with the conformationally variable V1/V2 and β20/β21 regions and more interactions at the loop D and V5 areas.

[0046] FIG. 33 is a set of electronic images showing electrostatic surfaces and maps of residues types of gp120. Electrostatic surfaces for the VRC01 and CD-bound gp120s are shown in the left panels with heavy chain variable domain (VH) of VRC01 (upper row) and domain 1 (D1) of CD4 (lower row). Both of VRC01 and CD4 bind to overall negatively charged surfaces on gp120. The flip sides of the complexes showing the electrostatic surfaces of VH and D1 are presented in the middle panels with gp120 in the foreground. The gp120 interfaces on VH of VRC01 and D1 of CD4 are mostly positively charged to complement the negatively charged gp120 surfaces. Certain residues, such as Arg71 in VRC01 and Arg59 in CD4, are conserved, the unique VRC01 Årg61 that penetrating the cavity formed by V5 and (324 is also shown. The electrostatic potential was calculated with APBS and visualized with Pymol.

[0047] FIG. 34 is a set of graphs showing the binding of VRC01 to gp120 stabilized in CD4-bound and non-CD4-bound conformations. Both gp120 in non-CD4-bound conformation (YU2 Δβ4) and gp120 stabilized in CD4-bound conformation (HXBc2 core Ds12F123) were immobilized on a CM-5 chip. Fabs of CD4-binding site antibodies VRC01, b12 and F105 and CD4-induced antibody 17b, two domain CD4 and CD4-IgαTP at various concentrations were injected over the chip channels.

[0048] FIGS. 35A and 35B are a set of electronic images and a bar graph showing a comparison of coverage of the site of vulnerability by different CD4-binding site antibodies. The site of vulnerability is the contact site for receptor CD4 on the outer domain of gp120. CD4-binding-site-directed antibodies target this general area, however, most of them do not neutralize potently. FIG. 35A shows that when the site of vulnerability is superimposed over the antibody epitopes on gp120 surfaces, the degrees of overlapping differ. VRC01 hits the “bull's-eye” while b12, b13 and F105 miss portions of the target with epitope straying away to other conformationally variable areas on gp120. FIG. 35B shows that when coverage of the site of vulnerability by epitopes of CD4-binding-site-directed antibodies were compared, VRC01 achieves almost full coverage (98%) while others, such as b13, F105 and b12, manage to get 50% to 83% overlapping coverage with CD4.

[0049] FIGS. 36A-36D are a set of electronic images and a sequence alignment showing the mechanism of natural resistance to VRC01. FIG. 36A shows a sequence threading of the 17 HIV-1 isolates that resist neutralization by VRC01. Spots that are closer than 2.5 Å to VRC01 are dark. These spots are clustered at the loop D and V5 region on HIV-1gp120. FIG. 36B shows a close-up of threaded, resistant isolates along with the molecular surface of VRC01. FIG. 36C shows VRC01 heavy chain Arg61 penetrating the gp120 cavity formed by V5 and (324. Some resistant isolates have bulky residues pointing into the cavity which interfere with Arg61VRC01 without affecting CD4 binding. FIG. 36D shows a sequence alignment of VRC01-resistant isolates at the V5 region (SEQ ID NO: 46). Black boxes highlight bulky residues that may interfere with binding of VRC01 and are different from the 93TH057 sequence. Different N-linked glycosylation patterns are also marked.

[0050] FIG. 37 is an electronic image showing the conformational variation of gp120 loopV5. Side-by-side comparison of conformation variation at the HIV-1 gp120 variable loop 5 region indicates that the four gp120 components (left panel, chains G, A, D and I) of the VRC01:gp120 complexes in the crystallographic asymmetric unit vary only at the tip of V5 loop and conformation of the V5 base is less flexible due to increased contacts by VRC01. In contrast, variation of V5 conformations in other gp120 complexes (right panel) with CD4 and CD4-binding site antibodies, F105, b12 and b13, spans over the whole range of V5 loop.

[0051] FIGS. 38A-38B are electronic images showing that VRC01 recognition of V5 and β24 of gp120 is different from that of CD4. FIGS. 38A and 38B illustrate that the V5 loop is wedged in the gap formed by the heavy and light chains of VRC01, meanwhile, Arg61 in the CDRH2 penetrates into the cavity formed by gp120 V5 and β24, locking V5 into a less flexible conformation. In contrast, CD4 only interacts with the “front side” of V5. FIGS. 38C and 38D illustrates that VRC01 engages extensive interactions with V5 and (324 with 10 hydrogen bonds and a salt bridge from both CDR H2 and CDR L3. While heavy chain Asn68, G1n64 and light chain Glu96 grab the front side of V5, heavy chain Arg61 goes behind the V5 and provides 4 hydrogen bonds to residues on β24. CD4, however, only has 3 hydrogen bonds to 2 V5 residues. It is worth to note that VRC01 only interacts with residues at the base of V5 loop and avoids the loop tip which has higher degree of sequence variation. The VRC01 CDRs are shown. Selected gp120 residues are labeled in italic.

[0052] FIG. 39 is a set of electronic images showing the key interface regions of the gp120:VRC01 complex. gp120-interacting CDRs of VRC01 are projected over the gp120 surface (left panel). Both heavy and light chains are involved in binding of gp120, mainly to the conformationally invariant outer domain. The CDR H2 spans over the CD4-binding loop and the V5/β24, with Arg61 penetrating the V5/β24 cavity (right panel). Arg71 in the framework 3 forms salt bridges with a conserved Asp368 in the CD4-binding loop of gp120. The light chain of CDRL1 and CDRL3 provide interactions to V5, loop D as well as the Loop D attached N-acetyl-glucosamine of a N-linked glycan.

[0053] FIG. 40 is an alignment of the VRC01 sequence, gp120 contacting-sites and extent of affinity maturation. The sequence of VRC01 (SEQ ID NO: 1 and SEQ ID NO: 2) is shown along with nearest VH- and VK/λ-genomic precursors for heavy (SEQ ID NO: 41) and light chain (SEQ ID 42), respectively. Affinity maturation changes are indicated in green, with residues involved in interaction with HIV-1 gp120 highlighted by “”, if involved in both main- and side-chain interactions, by “◯” if main chain-only, and by “¤” if side chain-only. “ [symbol] ” marks a site of N-linked glycosylation, “▴” for Cysteine residues involved in a noncanonical disulfide, and “Δ” if the residue has been deleted during affinity maturation.

[0054] FIG. 41 is a bar graph showing the contact, V-gene mutated, and mutated contact residues for the set of 26 antibodies and VRC01. Any antibody residue in contact with the antigen in the complex is included towards the total number of contact residues. The number of mutations from germline for the Vh and Vl/Vk, as well as the number of mutated contact residues are shown. The number of mutations excludes insertions and deletions. Germline alignment was performed using the amino acid sequences for the antibody heavy and light chains. For comparison, also shown is the number of mutated residues (total and only contact residues) when germline alignment is performed for the **VRC01 nucleotide sequence.

[0055] FIG. 42 is an electronic image showing of the contributions of VRC01 VH-D-J and VK-J fragments to the binding of HIV-1 gp120. The variable domains of VRC01 are shown in cartoon diagram and the gp120 binding areas are masked with a surface.

[0056] FIG. 43 is the alignment of VRC01 Vh (SEQ ID NO: 1) to the ten closest germline genes. Results were obtained from IgBLAST using the VRC01 Vh nucleotide sequence. Residue identities are shown as dots. The nucleotide identity fraction for each of the ten germline genes, as reported by IgBLAST, is also shown.

[0057] FIG. 44 is the alignment of VRC01 Vk (SEQ ID NO: 2) to the ten closest germline genes. Results were obtained from IgBLAST using the VRC01 Vk nucleotide sequence up to amino acid residue Q90; since IGKV3-NL1*01 is ‘not localized’, IGKV3-11*01 was selected as a top match for the Vk germline. When comparing to IGKV3-11*01 using nucleotide sequences, the two-residue deletion in VRC01 Vk aligns to two S residues and involves a neighboring S->Y mutation. Residue identities are shown as dots. The nucleotide identity fraction for each of the ten germline genes, as reported by IgBLAST, is also shown.

[0058] FIGS. 45A-45C is a set of graphs showing the results of a sequence comparison of VRC01, VRC02 and VRC03 to a collection of gp140-binding antibodies. FIG. 45A is a VH and Vk repertoire analysis for a collection of gp140-binding antibodies and VRC01, 02 and 03. The pie charts display the distribution of V gene usage among the collection of unique antibodies. VRC01, 02, 03 genes are indicated with red arrows.

[0059] FIG. 45B shows a CDR amino acid length of the collection of antibodies compared to VRC01, 02 and 03 indicated with a red arrow. CDR3 lengths were determined according to NCBI IgBlast nomenclature with the CDR3 region starting after the CTR and CVR amino acids for VRC01, 02 and 03, respectively. FIG. 45C shows the number of nucleotide mutations in the V genes of the antibody collection compared to VRC01, 02 and 03.

[0060] FIG. 46 is a set of graphs showing the correlations between the number of affinity matured residues in VH and Vk and SPR determined dissociation constants, ELISA (EC50) binding, and neutralization (IC50) data for a set of VRC01 variants. VRC01 variants were made to revert interface residues to their corresponding VH- and Vkgermline- encoded residues in a series of single-, 4-, 7- or 12-residue mutations.

[0061] FIG. 47 is Table S1.

[0062] FIG. 48 is Table S2.

[0063] FIG. 49 is Table S3.

[0064] FIG. 50 is Table S4.

[0065] FIG. 51 is Table S5.

[0066] FIG. 52 is Table S6.

[0067] FIG. 53 is Table S7.

[0068] FIG. 54 is Table S8.

[0069] FIG. 55 is Table S9.

[0070] FIG. 56 is Table S10a.

[0071] FIG. 57 is Table S10b.

[0072] FIG. 58 is Table S11.

[0073] FIG. 59 is Table S12.

[0074] FIG. 60 is Table S13.

[0075] FIG. 61 is Table S14.

[0076] FIGS. 62A-62C is a set of electronic images a sequence alignment and a bar graph showing F5 CDR H3 loop mutagenesis (SEQ ID NOs: 47-58). FIG. 62A illustrates the structure of 2F5 Fab in complex with a gp41 peptide. The 2F5 CDR H3 contacts gp41 only at its base, while the tip extends away from the peptide. FIG. 62B is a close-up view of the 2F5 CDR H3 loop. FIG. 62C shows mutations introduced into the tip of the 2F5 CDR H3 (100A to 100F) along with a plot of the Wimley-White predicted free energies of transfer to a lipid bilayer interface or to octanol for each of the mutations.

[0077] FIG. 63 is Table 1.

[0078] FIG. 64 is a set of graphs showing the neutralization of HxB2 by CDR H3 mutants of antibody 2F5. Top, neutralization profiles of 2F5 variants with single mutations to serine. Single serine substitutions resulted in a 15- to 500-fold reduction in neutralization potency. Middle, neutralization profiles of double mutations to serine. Double serine substitutions completely abrogated 2F5-mediated neutralization. Bottom, neutralization profiles of 2F5 variants with mutations to tryptophan. Tryptophan substitutions were either commensurate with or more potent than wild-type 2F5. Neutralization curves for wild-type 2F5 IgG are colored black and are shown in all three panels. 1D4, mouse anti rhodopsin antibody used as a negative control.

[0079] FIGS. 65A-65C are a set of graphs showing the relationship between 2F5-mediated HIV-1 neutralization and the hydrophobicity of its CDR H3 loop. FIG. 65A shows 2F5 variant neutralization IC50s plotted against the calculated ΔG_{wif} of the 2F5 CDR H3 loop for each virus strain tested. Linear regressions were fit to each individual group, and no significant differences were observed in the slopes of each of the curves. The resulting P values of the correlations were statistically significant (P<0.02) for all strains tested, with the exception of RHPA-4259. FIG. 65B shows 2F5 variant neutralization IC50s plotted against affinity to gp41MPER peptide, with linear fits applied to each group. No statistically significant associations were observed in this case, and the regressions appeared largely driven by the KD of 2F5 variant HOOFS to gp41, likely because of minor contacts made by this residue with gp41. FIG. 65 C shows plots of relative free energies of neutralization (ΔG^{N}) versus calculated ΔG_{wif} values, along with individual solid lines) and shared (dashed black line and displayed statistics) linear fits for all strains tested. HIV strains are represented as symbols and lines. The dashed vertical lines define the ΔG_{wif} value of the wild-type 2F5 CDR H3 tip or the KD of wild-type 2F5 to gp41 peptide.

[0080] FIG. 66 is Table 2.

[0081] FIGS. 67A-67C are a depiction of the threshold for effects of increased 2F5 CDR H3 loop hydrophobicity. To account for the observed leveling off of the effects of increased 2F5 CDR H3 loop hydrophobicity, quadratic fits were applied to the data shown in FIG. 66. FIG. 67A, 2F5 variant neutralization IC50s plotted against the calculated ΔG_{wif} of the 2F5 CDR H3 loop for each virus strain tested. Individual curves were fit to each group using a quadratic regression model, which revealed no significant differences in their slopes or quadratic terms. FIG. 67B, plot of relative free energies of neutralization (ΔΔG^{N}) versus calculated ΔG_{wif}. As in panel A, individual curves were fit to each group using a quadratic regression model, which revealed no significant differences in their slopes or quadratic terms. FIG. 67C, the quadratic models were refit to the data using common estimates of the slopes and quadratic terms and plotted as a shared quadratic regression for all strains tested (dashed black line). A minimum of the ΔΔG^{N} was observed to occur at a ΔG_{wif} of −4.08 kcal/mol (arrow), representing the maximal effect on neutralization beyond which increased hydrophobicity of the CDR H3 loop had detrimental effects on 2F5-mediated neutralization. HIV strains are represented as symbols and lines. The dashed vertical lines (gray) define the ΔG_{wif} value of the wild-type 2F5 CDR H3 tip.

[0082] FIG. 68 is schematic representation of the two-component mechanism of 2F5-mediated neutralization of HIV-1. The free energy of 2F5-mediated neutralization of HIV-1, ΔG^{N} (diagonal), can be expressed as the sum of the free energy of its structure-specific recognition of its gp41MPER epitope (vertical component) combined with the free energy of nonspecific interactions mediated by the hydrophobic tip of its CDR H3 loop (horizontal component). Structural representations of each component are shown.

[0083] FIG. 69 is Table s1.

[0084] FIG. 70 is Table s2.

[0085] FIG. 71 is Table s3.

[0086] FIG. 72 is a set of graphs showing the results of surface plasmon resonance binding profiles of 2F5 variants to gp41 peptide. Shown are representative biacore binding profiles of gp41-MPER-C9 peptide to wild-type and mutant 2F5 IgG's (black), overlaid with fits of the data. In all cases, IgGs were directly coupled to CM5 chips, and the peptide was used as analyte. Plotted analyte concentratations are 2-fold serial dilutions ranging from 31 nM to 0.49 nM, except for 2F5 variant L100AS-F100BS, which ranged from 15 nM to 0.49 nM, and variants L100ASV100DS and F100BS-1100FS, which ranged from 125 nM to 0.49 nM. In all cases, nanomolar binding affinity to gp41 peptide was maintained.

[0087] FIGS. 73A-73D is a set of graphs of the relationship between HIV-1 neutralization and ΔG_{oct}, hydrophobicity of 2F5 CDR H3 P<0.0001 variants. FIG. 73A, 2F5-variant neutralization IC50s plotted against calculated ΔG_{oct} of the 2F5 CDR H3 loop, for each virus strain tested. Linear regressions were fit to each individual group, and no significant differences were observed in their slopes. The resulting P-values of the correlations were all statistically significant (P<0.05), with the exception of RHPA-4259. FIG. 73B shows that quadratic regressions fit to the same data as in FIG. 73A, reveal no significant differences in the slopes or quadratic terms. Plots of relative free energies of neutralization (ΔΔG^{N}) versus calculated ΔG_{oct} were fit with linear (FIG. 73C) and quadratic regression models (FIG. 73D), as shown. Shared regressions across all strains in FIG. 73C and FIG. 73D are represented as dashed black lines. A dashed vertical line defines the AG, properties of the wild-type 2F5 CDR H3 tip.

[0088] FIG. 74A is a schematic diagram and the sequence of VRC01 ImmunoAdhesin HL (SEQ ID NO: 66).

[0089] FIG. 74B is a schematic diagram and the sequence of VRC01 ImmunoAdhesin LH (SEQ ID NO: 66).

[0090] FIGS. 75A-75E is a series of schematic diagrams for VRC8551, VRC8552, VRC9709, VRC9710, VRC9711, VRC9712, VRC9713, VRC9714, VRC9715, VRC9716, VRC9717, VRC9712, VRC9713 and VRC9174.

[0091] FIG. 76 is a table and an electronic image of a protein gel showing the expression of chimeras of VRC01 and VRC03.

[0092] FIG. 77 is a set of graphs showing exemplary neutralization data for clade A HIV viruses obtained from VRC01 and VRC03 chimeric antibodies.

[0093] FIG. 78 is a set of graphs showing exemplary neutralization data for clade B HIV viruses obtained from VRC01 and VRC03 chimeric antibodies.

[0094] FIG. 79 is a set of graphs showing exemplary neutralization data for clade C HIV viruses obtained from VRC01 and VRC03 chimeric antibodies.

[0095] FIG. 80 is a sequence alignment of the amino acid sequence of the heavy chain of antibody 57203 (SEQ ID NO: 1322) identified by 454 sequencing, the germline sequence IGHV1-02*02 (SEQ ID NO: 41), VRC01 (SEQ ID NO: 1), VRC02 (SEQ ID NO: 3) and VRC03 (SEQ ID NO: 27).

[0096] FIGS. 81A-81G are a set of graphs of exemplary neutralization data of the 57203 heavy chain VRC01 light chain chimera demonstrating that the 57203 is VRC01 like, in that it complements the VRC01 light chain.

[0097] FIG. 82 is a graph showing the distribution of the VRC01 and VRC03 sequences set for as SEQ ID NOs: 760-1459.

[0098] FIGS. 83-91 and 93-97 are supporting data showing the conserved gp120 epitope common to the binding site of VRC01 and VRC03-like antibodies.

[0099] FIG. 92 shows the preduction of VCRO1 multimers.

[0100] FIGS. 97-117 are supporting data showing bioinformatics analysis.

### SEQUENCE LISTING

[0101] The nucleic and amino acid sequences listed in the accompanying sequence listing are shown using standard letter abbreviations for nucleotide bases, and three letter code for amino acids, as defined in 37 C.F.R. 1.822. Only one strand of each nucleic acid sequence is shown, but the complementary strand is understood as included by any reference to the displayed strand. In the accompanying sequence listing:

[0102] SEQ ID NO: 1 is the amino acid sequence of the heavy chain of gp120-specific antibody VRC01.

[0103] SEQ ID NO: 2 is the amino acid sequence of the light chain of gp120-specific antibody VRC01.

[0104] SEQ ID NO: 3 is the amino acid sequence of the heavy chain of gp120-specific antibody VRC02.

[0105] SEQ ID NO: 4 is the amino acid sequence of the light chain of gp120-specific antibody VRC02.

[0106] SEQ ID NO: 5 is the amino acid sequence of the heavy chain of gp41-specific antibody 2F5.

[0107] SEQ ID NO: 6 is the amino acid sequence of the heavy chain of gp41-specific antibody 2F5 L_{100A}W.

[0108] SEQ ID NO: 7 is the amino acid sequence of the heavy chain of gp41-specific antibody 2F5 F_{100B}W.

[0109] SEQ ID NO: 8 is the amino acid sequence of the heavy chain of gp41-specific antibody 2F5 V_{100D}W.

[0110] SEQ ID NO: 9 is the amino acid sequence of the heavy chain of gp41-specific antibody 2F5 L_{100A}W-V_{100D}W.

[0111] SEQ ID NO: 10 is the amino acid sequence of the light chain of gp41-specific antibody 2F5.

[0112] SEQ ID NO: 11 is the gp41MPER Epitope Scaffold Immunological Probe ES1 (1LGYA) Clade B.

[0113] SEQ ID NO: 12 is the gp41MPER Epitope Scaffold Immunological Probe ES1 (1LGYA) Clade B point mutant.

[0114] SEQ ID NO: 13 is the gp41MPER Epitope Scaffold Immunological Probe ES1 (1LGYA) Clade C.

[0115] SEQ ID NO: 14 is the gp41MPER Epitope Scaffold Immunological Probe ES2 (1KU2A-s) Clade B.

[0116] SEQ ID NO: 15 is the gp41MPER Epitope Scaffold Immunological Probe ES2 (1KU2A-s) Clade B point mutant.

[0117] SEQ ID NO: 16 is the gp41MPER Epitope Scaffold Immunological Probe ES2 (1KU2A-s) Clade C.

[0118] SEQ ID NO: 17 is the gp41MPER Epitope Scaffold Immunological Probe ES3 (2MATA) Clade B.

[0119] SEQ ID NO: 18 is the gp41MPER Epitope Scaffold Immunological Probe ES3 (2MATA) Clade B point mutant.

[0120] SEQ ID NO: 19 is the gp41MPER Epitope Scaffold Immunological Probe ES3 (2MATA) Clade C.

[0121] SEQ ID NO: 20 is the gp41MPER Epitope Scaffold Immunological Probe ES4 (11WLA) Clade B.

[0122] SEQ ID NO: 21 is the gp41MPER Epitope Scaffold Immunological Probe ES4 (11WLA) Clade B point mutant.

[0123] SEQ ID NO: 22 is the gp41MPER Epitope Scaffold Immunological Probe ES4 (11WLA) Clade C.

[0124] SEQ ID NO: 23 is the gp41MPER Epitope Scaffold Immunological Probe ES5 (1D3BB) Clade B.

[0125] SEQ ID NO: 24 is the gp41MPER Epitope Scaffold Immunological Probe ES5 (1D3BB) Clade B point mutant.

[0126] SEQ ID NO: 25 is the gp41MPER Epitope Scaffold Immunological Probe ES5 (1D3BB) Clade C.

[0127] SEQ ID NO: 26 is the Avitag amino acid sequence.

[0128] SEQ ID NO: 27 is the amino acid sequence of the heavy chain of gp120-specific antibody VRC03.

[0129] SEQ ID NO: 28 is the amino acid sequence of the light chain of gp120-specific antibody VRC03.

[0130] SEQ ID NO: 29 is the nucleic acid sequence of the heavy chain of gp120-specific antibody VRC01.

[0131] SEQ ID NO: 30 is the nucleic acid sequence of the light chain of gp120-specific antibody VRC01.

[0132] SEQ ID NO: 31 is the nucleic acid sequence of the heavy chain of gp120-specific antibody VRC02.

[0133] SEQ ID NO: 32 is the nucleic acid sequence of the light chain of gp120-specific antibody VRC02.

[0134] SEQ ID NO: 33 is the nucleic acid sequence of the heavy chain of gp120-specific antibody VRC03.

[0135] SEQ ID NO: 34 is the nucleic acid sequence of the light chain of gp120-specific antibody VRC03.

[0136] SEQ ID NO: 35 is the nucleic acid sequence of VRC01 ImmunoAdhesin HL.

[0137] SEQ ID NO: 36 is the amino acid sequence of an exemplary mouse interleukin-2 (IL-2) leader sequence.

[0138] SEQ ID NO: 37 is the amino acid sequence of an exemplary gp120 V1/V2 loop.

[0139] SEQ ID NO: 38 is the amino acid sequence of an exemplary gp120 V3 loop.

[0140] SEQ ID NO: 39 is the amino acid sequence of an exemplary peptide linker

[0141] SEQ ID NO: 40 is the amino acid sequence of an en exemplary peptide corresponding to residues 657 to 669 of linked to a C-terminal C9 tag.

[0142] SEQ ID NO: 41 is the amino acid sequence of the heavy chain of IGHV1-02*02.

[0143] SEQ ID NO: 42 is the amino acid sequence of the VK gene IGKV3-11*01.

[0144] SEQ ID NO: 43 is the amino acid sequence of the VK gene IGKV3-20*01.

[0145] SEQ ID NO: 44 is the amino acid sequence for the wild type clade B HXBc2 core gp120.

[0146] SEQ ID NO: 45 is the amino acid sequence for the wild type clade A/E 93TH057 core gp120.

[0147] SEQ ID NO: 46 is the amino acid sequence of aV5 region of a gp120.

[0148] SEQ ID NOs: 47-58 are the amino acids sequences of 2F5 CDR H3 loop mutants.

[0149] SEQ ID NO: 59 is the amino acid sequence of a V1/V2 trim sequence of gp120 from HIV SEQ ID NO: 60 is the nucleic acid sequence of VRC01 ImmunoAdhesin LH.

[0150] SEQ ID NOs: 61-759 are nucleic acid sequence of the heavy chains of VRC01 and VRC03-like antibodies.

[0151] SEQ ID NOs: 760-1459 are amino acid sequence of the heavy chains of VRC01 and VRC03-like antibodies.

[0152] SEQ ID NOs: 1460-1505 are germline sequences for VRC01-like antibodies.

[0153] The Sequence Listing is submitted as an ASCII text file in the form of the file named Sequence.txt, which was created on Mar. 22, 2012, and is ˜1.3 MB bytes, which is incorporated by reference herein.

### DETAILED DESCRIPTION

### I. Terms

[0154] Unless otherwise noted, technical terms are used according to conventional usage. Definitions of common terms in molecular biology can be found in Benjamin Lewin, Genes V, published by Oxford University Press, 1994 (ISBN 0-19-854287-9); Kendrew et al. (eds.), The Encyclopedia of Molecular Biology, published by Blackwell Science Ltd., 1994 (ISBN 0-632-02182-9); and Robert A. Meyers (ed.), Molecular Biology and Biotechnology: a Comprehensive Desk Reference, published by VCH Publishers, Inc., 1995 (ISBN 1-56081-569-8). Terms describing protein structure and structural elements of proteins can be found in Creighton, Proteins, Structures and Molecular Properties, W.H. Freeman & Co., New York, 1993 (ISBN 0-717-7030) which is incorporated by reference herein in its entirety.

[0155] Unless otherwise explained, all technical and scientific terms used herein have the same meaning as commonly understood by one of ordinary skill in the art to which this disclosure belongs. The singular terms “a,” “an,” and “the” include plural referents unless context clearly indicates otherwise. Similarly, the word “or” is intended to include “and” unless the context clearly indicates otherwise.

[0156] It is further to be understood that all base sizes or amino acid sizes, and all molecular weight or molecular mass values, given for nucleic acids or polypeptides are approximate, and are provided for descriptive purposes, unless otherwise indicated. Although many methods and materials similar or equivalent to those described herein can be used, particular suitable methods and materials are described below. In case of conflict, the present specification, including explanations of terms, will control. In addition, the materials, methods, and examples are illustrative only and not intended to be limiting.

[0157] To facilitate review of the various embodiments of this disclosure, the following explanations of terms are provided:

[0158] Administration:

[0159] The introduction of a composition into a subject by a chosen route. Administration can be local or systemic. For example, if the chosen route is intravenous, the composition is administered by introducing the composition into a vein of the subject. In some examples a disclosed antibody specific for an HIV protein or polypeptide is administered to a subject.

[0160] Amino Acid Substitution:

[0161] The replacement of one amino acid in peptide with a different amino acid.

[0162] Amplification:

[0163] A technique that increases the number of copies of a nucleic acid molecule (such as an RNA or DNA). An example of amplification is the polymerase chain reaction, in which a biological sample is contacted with a pair of oligonucleotide primers, under conditions that allow for the hybridization of the primers to a nucleic acid template in the sample. The primers are extended under suitable conditions, dissociated from the template, and then re-annealed, extended, and dissociated to amplify the number of copies of the nucleic acid. The product of amplification can be characterized by electrophoresis, restriction endonuclease cleavage patterns, oligonucleotide hybridization or ligation, and/or nucleic acid sequencing using standard techniques. Other examples of amplification include strand displacement amplification, as disclosed in U.S. Pat. No. 5,744,311; transcription-free isothermal amplification, as disclosed in U.S. Pat. No. 6,033,881; repair chain reaction amplification, as disclosed in WO 90/01069; ligase chain reaction amplification, as disclosed in EP-A-320 308; gap filling ligase chain reaction amplification, as disclosed in U.S. Pat. No. 5,427,930; and NASBA™ RNA transcription-free amplification, as disclosed in U.S. Pat. No. 6,025,134.

[0164] Animal:

[0165] Living multi-cellular vertebrate organisms, a category that includes, for example, mammals and birds. The term mammal includes both human and non-human mammals. Similarly, the term “subject” includes both human and veterinary subjects.

[0166] Antibody:

[0167] A polypeptide substantially encoded by an immunoglobulin gene or immunoglobulin genes, or antigen binding fragments thereof, which specifically binds and recognizes an analyte (antigen) such as gp120, or gp41 or an antigenic fragment of gp120 or gp41. Immunoglobulin genes include the kappa, lambda, alpha, gamma, delta, epsilon and mu constant region genes, as well as the myriad immunoglobulin variable region genes.

[0168] Antibodies exist, for example as intact immunoglobulins and as a number of well characterized fragments produced by digestion with various peptidases. For instance, Fabs, Fvs, and single-chain Fvs (scFvs) that specifically bind to gp120 or fragments of gp120 would be gp120-specific binding agents. Similarly, Fabs, Fvs, scFvs that specifically bind to gp41 or fragments of gp41 would be gp41-specific binding agents. A scFv protein is a fusion protein in which a light chain variable region of an immunoglobulin and a heavy chain variable region of an immunoglobulin are bound by a linker, while in dsFvs, the chains have been mutated to introduce a disulfide bond to stabilize the association of the chains. The term also includes genetically engineered forms such as chimeric antibodies (such as humanized murine antibodies), heteroconjugate antibodies such as bispecific antibodies). See also, Pierce Catalog and Handbook, 1994-1995 (Pierce Chemical Co., Rockford, Ill.); Kuby, J., Immunology, 3^{rd} Ed., W.H. Freeman & Co., New York, 1997.

[0169] Antibody fragments are defined as follows: (1) Fab, the fragment which contains a monovalent antigen-binding fragment of an antibody molecule produced by digestion of whole antibody with the enzyme papain to yield an intact light chain and a portion of one heavy chain; (2) Fab′, the fragment of an antibody molecule obtained by treating whole antibody with pepsin, followed by reduction, to yield an intact light chain and a portion of the heavy chain; two Fab′ fragments are obtained per antibody molecule; (3) (Fab′)₂, the fragment of the antibody obtained by treating whole antibody with the enzyme pepsin without subsequent reduction; (4) F(ab′)₂, a dimer of two Fab′ fragments held together by two disulfide bonds; (5) Fv, a genetically engineered fragment containing the variable region of the light chain and the variable region of the heavy chain expressed as two chains; and (6) single chain antibody (“SCA”), a genetically engineered molecule containing the variable region of the light chain, the variable region of the heavy chain, linked by a suitable polypeptide linker as a genetically fused single chain molecule. The term “antibody,” as used herein, also includes antibody fragments either produced by the modification of whole antibodies or those synthesized de novo using recombinant DNA methodologies.

[0170] Typically, a naturally occurring immunoglobulin has heavy (H) chains and light (L) chains interconnected by disulfide bonds. There are two types of light chain, lambda (λ) and kappa (κ). There are five main heavy chain classes (or isotypes) which determine the functional activity of an antibody molecule: IgM, IgD, IgG, IgA and IgE.

[0171] Each heavy and light chain contains a constant region and a variable region, (the regions are also known as “domains”). In combination, the heavy and the light chain variable regions specifically bind the antigen. Light and heavy chain variable regions contain a “framework” region interrupted by three hypervariable regions, also called “complementarity-determining regions” or “CDRs.” The extent of the framework region and CDRs have been defined (see, Kabat et al., Sequences of Proteins of Immunological Interest, U.S. Department of Health and Human Services, 1991, which is hereby incorporated by reference in its entirety). Thus one of ordinary skill in the art will recognize the numbering of the residues in the disclosed antibodies is made with reference to the Kabat convention. The Kabat database is now maintained online. The sequences of the framework regions of different light or heavy chains are relatively conserved within a species. The framework region of an antibody, that is the combined framework regions of the constituent light and heavy chains, serves to position and align the CDRs in three-dimensional space.

[0172] The CDRs are primarily responsible for binding to an epitope of an antigen. The CDRs of each chain are typically referred to as CDR1, CDR2, and CDR3, numbered sequentially starting from the N-terminus, and are also typically identified by the chain in which the particular CDR is located. Thus, a V_{H} CDR3 is located in the variable domain of the heavy chain of the antibody in which it is found, whereas a V_{L} CDR1 is the CDR1 from the variable domain of the light chain of the antibody in which it is found. Light chain CDRs are sometimes referred to as CDR L1, CDR L2, and CDR L3. Heavy chain CDRs are sometimes referred to as CDR H1, CDR H2, and CDR H3.

[0173] References to “V_{H}” or “VH” refer to the variable region of an immunoglobulin heavy chain, including that of an antibody fragment, such as Fv, scFv, dsFv or Fab. References to “V_{L}” or “VL” refer to the variable region of an immunoglobulin light chain, including that of an Fv, scFv, dsFv or Fab.

[0174] A “monoclonal antibody” is an antibody produced by a single clone of B-lymphocytes or by a cell into which the light and heavy chain genes of a single antibody have been transfected. Monoclonal antibodies are produced by methods known to those of skill in the art, for instance by making hybrid antibody-forming cells from a fusion of myeloma cells with immune spleen cells. These fused cells and their progeny are termed “hybridomas.” Monoclonal antibodies include humanized monoclonal antibodies. In some examples monoclonal antibodies are isolated from a subject. The amino acid sequences of such isolated monoclonal antibodies can be determined.

[0175] A “humanized” immunoglobulin is an immunoglobulin including a human framework region and one or more CDRs from a non-human (such as a mouse, rat, or synthetic) immunoglobulin. The non-human immunoglobulin providing the CDRs is termed a “donor,” and the human immunoglobulin providing the framework is termed an “acceptor.” In one embodiment, all the CDRs are from the donor immunoglobulin in a humanized immunoglobulin. Constant regions need not be present, but if they are, they must be substantially identical to human immunoglobulin constant regions, such as at least about 85-90%, such as about 95% or more identical. Hence, all parts of a humanized immunoglobulin, except possibly the CDRs, are substantially identical to corresponding parts of natural human immunoglobulin sequences. A “humanized antibody” is an antibody comprising a humanized light chain and a humanized heavy chain immunoglobulin. A humanized antibody binds to the same antigen as the donor antibody that provides the CDRs. The acceptor framework of a humanized immunoglobulin or antibody may have a limited number of substitutions by amino acids taken from the donor framework. Humanized or other monoclonal antibodies can have additional conservative amino acid substitutions which have substantially no effect on antigen binding or other immunoglobulin functions. Humanized immunoglobulins can be constructed by means of genetic engineering (for example, see U.S. Pat. No. 5,585,089).

[0176] Antigen:

[0177] A compound, composition, or substance that can stimulate the production of antibodies or a T cell response in an animal, including compositions that are injected or absorbed into an animal. An antigen reacts with the products of specific humoral or cellular immunity, including those induced by heterologous antigens, such as the disclosed antigens. “Epitope” or “antigenic determinant” refers to the region of an antigen to which B and/or T cells respond. In one embodiment, T cells respond to the epitope, when the epitope is presented in conjunction with an MHC molecule. Epitopes can be formed both from contiguous amino acids or noncontiguous amino acids juxtaposed by tertiary folding of a protein. Epitopes formed from contiguous amino acids are typically retained on exposure to denaturing solvents whereas epitopes formed by tertiary folding are typically lost on treatment with denaturing solvents. An epitope typically includes at least 3, and more usually, at least 5, about 9, or about 8-10 amino acids in a unique spatial conformation. Methods of determining spatial conformation of epitopes include, for example, x-ray crystallography and nuclear magnetic resonance.

[0178] Examples of antigens include, but are not limited to, peptides, lipids, polysaccharides, and nucleic acids containing antigenic determinants, such as those recognized by an immune cell. In some examples, antigens include peptides derived from a pathogen of interest. Exemplary pathogens include bacteria, fungi, viruses and parasites. In specific examples, an antigen is derived from HIV, such as a gp120 polypeptide or antigenic fragment thereof, such as a gp120 outer domain or fragment thereof. In other examples an antigen a gp41 polypeptide derived from HIV or antigenic fragment thereof.

[0179] A “target epitope” is a specific epitope on an antigen that specifically binds a antibody of interest, such as a monoclonal antibody. In some examples, a target epitope includes the amino acid residues that contact the antibody of interest, such that the target epitope can be selected by the amino acid residues determined to be in contact with the antibody of interest.

[0180] Antigenic Surface:

[0181] A surface of a molecule, for example a protein such as a gp120 protein or polypeptide, capable of eliciting an immune response. An antigenic surface includes the defining features of that surface, for example the three-dimensional shape and the surface charge. An antigenic surface includes both surfaces that occur on gp120 polypeptides as well as surfaces of compounds that mimic the surface of a gp120 polypeptide (mimetics). In some examples, an antigenic surface include all or part of the surface of gp120 that binds to the CD4 receptor.

[0182] Atomic Coordinates or Structure Coordinates:

[0183] Mathematical coordinates derived from mathematical equations related to the patterns obtained on diffraction of a monochromatic beam of X-rays by the atoms (scattering centers) such as an antigen, or an antigen in complex with an antibody. In some examples that antigen can be gp120, a gp120:antibody complex, or combinations thereof in a crystal. In some examples that antigen can be gp41, a gp41:antibody complex, or combinations thereof in a crystal. The diffraction data are used to calculate an electron density map of the repeating unit of the crystal. The electron density maps are used to establish the positions of the individual atoms within the unit cell of the crystal. In one example, the term “structure coordinates” refers to Cartesian coordinates derived from mathematical equations related to the patterns obtained on diffraction of a monochromatic beam of X-rays, such as by the atoms of a gp120 in crystal form.

[0184] Those of ordinary skill in the art understand that a set of structure coordinates determined by X-ray crystallography is not without standard error. For the purpose of this disclosure, any set of structure coordinates that have a root mean square deviation of protein backbone atoms (N, Cα, C and 0) of less than about 1.0 Angstroms when superimposed, such as about 0.75, or about 0.5, or about 0.25 Angstroms, using backbone atoms, shall (in the absence of an explicit statement to the contrary) be considered identical.

[0185] Binding Affinity

[0186] Affinity of an antibody or antigen binding fragment thereof for an antigen. In one embodiment, affinity is calculated by a modification of the Scatchard method described by Frankel et al., Mol. Immunol., 16:101-106, 1979. In another embodiment, binding affinity is measured by an antigen/antibody dissociation rate. In yet another embodiment, a high binding affinity is measured by a competition radioimmunoassay. In several examples, a high binding affinity is at least about 1×10⁻⁸ M. In other embodiments, a high binding affinity is at least about 1.5×10⁻⁸, at least about 2.0×10⁻⁸, at least about 2.5×10⁻⁸, at least about 3.0×10⁻⁸, at least about 3.5×10⁻⁸, at least about 4.0×10⁻⁸, at least about 4.5×10⁻⁸, or at least about 5.0×10⁻⁸ M.

[0187] CD4:

[0188] Cluster of differentiation factor 4 polypeptide; a T-cell surface protein that mediates interaction with the MHC class II molecule. CD4 also serves as the primary receptor site for HIV on T-cells during HIV-I infection. CD4 is known to bind to gp120 from HIV. The known sequence of the CD4 precursor has a hydrophobic signal peptide, an extracellular region of approximately 370 amino acids, a highly hydrophobic stretch with significant identity to the membrane-spanning domain of the class II MHC beta chain, and a highly charged intracellular sequence of 40 resides (Maddon, Cell 42:93, 1985).

[0189] The term “CD4” includes polypeptide molecules that are derived from CD4 include fragments of CD4, generated either by chemical (for example enzymatic) digestion or genetic engineering means. Such a fragment may be one or more entire CD4 protein domains. The extracellular domain of CD4 consists of four contiguous immunoglobulin-like regions (D1, D2, D3, and D4, see Sakihama et al., Proc. Natl. Acad. Sci. 92:6444, 1995; U.S. Pat. No. 6,117,655), and amino acids 1 to 183 have been shown to be involved in gp120 binding. For instance, a binding molecule or binding domain derived from CD4 would comprise a sufficient portion of the CD4 protein to mediate specific and functional interaction between the binding fragment and a native or viral binding site of CD4. One such binding fragment includes both the D1 and D2 extracellular domains of CD4 (D1D2 is also a fragment of soluble CD4 or sCD4 which is comprised of D1 D2 D3 and D4), although smaller fragments may also provide specific and functional CD4-like binding. The gp120-binding site has been mapped to D1 of CD4.

[0190] CD4 polypeptides also include “CD4-derived molecules” which encompasses analogs (non-protein organic molecules), derivatives (chemically functionalized protein molecules obtained starting with the disclosed protein sequences) or mimetics (three-dimensionally similar chemicals) of the native CD4 structure, as well as proteins sequence variants or genetic alleles that maintain the ability to functionally bind to a target molecule.

[0191] CD4BS Antibodies:

[0192] Antibodies that bind to or substantially overlap the CD4 binding surface of a gp120 polypeptide. The antibodies interfere with or prevent CD4 from binding to a gp120 polypeptide.

[0193] CD4i Antibodies:

[0194] Antibodies that bind to a conformation of gp120 induced by CD4 binding.

[0195] Chimeric Antibody:

[0196] An antibody which includes sequences derived from two different antibodies, which typically are of different species. In some examples, a chimeric antibody includes one or more CDRs and/or framework regions from one human antibody and CDRs and/or framework regions from another human antibody.

[0197] Contacting:

[0198] Placement in direct physical association; includes both in solid and liquid form, which can take place either in vivo or in vitro. Contacting includes contact between one molecule and another molecule, for example the amino acid on the surface of one polypeptide, such as an antigen, that contacts another polypeptide, such as an antibody. Contacting can also include contacting a cell for example by placing an antibody in direct physical association with a cell.

[0199] Computer Readable Media:

[0200] Any medium or media, which can be read and accessed directly by a computer, so that the media is suitable for use in a computer system. Such media include, but are not limited to: magnetic storage media such as floppy discs, hard disc storage medium and magnetic tape; optical storage media such as optical discs or CD-ROM; electrical storage media such as RAM and ROM; and hybrids of these categories such as magnetic/optical storage media.

[0201] Computer System:

[0202] Hardware that can be used to analyze atomic coordinate data and/or design an antigen using atomic coordinate data. The minimum hardware of a computer-based system typically comprises a central processing unit (CPU), an input device, for example a mouse, keyboard, and the like, an output device, and a data storage device. Desirably a monitor is provided to visualize structure data. The data storage device may be RAM or other means for accessing computer readable. Examples of such systems are microcomputer workstations available from Silicon Graphics Incorporated and Sun Microsystems running Unix based Windows NT or IBM OS/2 operating systems.

[0203] Epitope:

[0204] An antigenic determinant. These are particular chemical groups or peptide sequences on a molecule that are antigenic, i.e. that elicit a specific immune response. An antibody specifically binds a particular antigenic epitope on a polypeptide. In some examples a disclosed antibody specifically binds to an epitope on the surface of gp120 from HIV. In some examples a disclosed antibody specifically binds to an epitope on the surface of gp41 from HIV.

[0205] Epitope Scaffold

[0206] Refers to a heterologous protein that is engrafted with a foreign epitope of interest on its surface. Transplantation of the epitope is performed computationally in a manner that preserves its relevant structure and conformation. Mutations within the acceptor scaffold are made in order to accommodate the epitope graft. The graft can be modified to represent the sequences of different clades and strains.

[0207] Framework Region

[0208] Amino acid sequences interposed between CDRs. Includes variable light and variable heavy framework regions. The framework regions serve to hold the CDRs in an appropriate orientation for antigen binding.

[0209] Fc Polypeptide

[0210] The polypeptide comprising the constant region of an antibody excluding the first constant region immunoglobulin domain. Fc region generally refers to the last two constant region immunoglobulin domains of IgA, IgD, and IgG, and the last three constant region immunoglobulin domains of IgE and IgM. An Fc region may also include part or all of the flexible hinge N-terminal to these domains. For IgA and IgM, an Fc region may or may not comprise the tailpiece, and may or may not be bound by the J chain. For IgG, the Fc region comprises immunoglobulin domains Cgamma2 and Cgamma3 (Cγ₂ and Cγ₃) and the lower part of the hinge between Cgamma1 (Cγ1) and Cγ₂. Although the boundaries of the Fc region may vary, the human IgG heavy chain Fc region is usually defined to comprise residues C226 or P230 to its carboxyl-terminus, wherein the numbering is according to the EU index as in Kabat. For IgA, the Fc region comprises immunoglobulin domains Calpha2 and Calpha3 (Cα2 and Cα3) and the lower part of the hinge between Calpha 1 (Cα1) and Cα2. Encompassed within the definition of the Fc region are functionally equivalent analogs and variants of the Fc region. A functionally equivalent analog of the Fc region may be a variant Fc region, comprising one or more amino acid modifications relative to the wild-type or naturally existing Fc region. Variant Fc regions will possess at least 50% homology with a naturally existing Fc region, such as about 80%, and about 90%, or at least about 95% homology. Functionally equivalent analogs of the Fc region may comprise one or more amino acid residues added to or deleted from the N- or C-termini of the protein, such as no more than 30 or no more than 10 additions and/or deletions. Functionally equivalent analogs of the Fc region include Fc regions operably linked to a fusion partner. Functionally equivalent analogs of the Fc region must comprise the majority of all of the Ig domains that compose Fc region as defined above; for example IgG and IgA Fc regions as defined herein must comprise the majority of the sequence encoding CH₂ and the majority of the sequence encoding CH₃. Thus, the CH₂ domain on its own, or the CH₃ domain on its own, are not considered Fc region. The Fc region may refer to this region in isolation, or this region in the context of an Fc fusion polypeptide (immunoadhesin, see below).

[0211] Furin

[0212] A calcium dependent serine endoprotease that cleaves precursor proteins at paired basic amino acid processing sites. In vivo, substrates of furin include proparathyroid hormone, proablumin, and von Willebrand factgor. Furin can also cleave HIV envelope protein gp160 into gp120 and gp41. Furin cleaves proteins just downstream of a basic amino acid target sequence (canonically, Arg-X-(Arg/Lys)-Arg'). Thus, this amino acid sequence is a furin cleavage site.

[0213] gp41:

[0214] A HIV protein that contains a transmembrane domain and remains in a trimeric configuration; it interacts with gp120 in a non-covalent manner. The envelope protein of HIV-1 is initially synthesized as a longer precursor protein of 845-870 amino acids in size, designated gp160. gp160 forms a homotrimer and undergoes glycosylation within the Golgi apparatus. In vivo, it is then cleaved by a cellular protease into gp120 and gp41. The amino acid sequence of an example of gp41 is set forth in GENBANK® Accession No. CAD20975 (as available on Oct. 16, 2009) which is incorporated by reference herein. It is understood that the sequence of gp41 can vary from that given in GENBANK® Accession No. CAD20975. gp41 contains a transmembrane domain and typically remains in a trimeric configuration; it interacts with gp120 in a non-covalent manner.

[0215] gp120:

[0216] An envelope protein from Human Immunodeficiency Virus (HIV). This envelope protein is initially synthesized as a longer precursor protein of 845-870 amino acids in size, designated gp160. gp160 is cleaved by a cellular protease into gp120 and gp41. gp120 contains most of the external, surface-exposed, domains of the HIV envelope glycoprotein complex, and it is gp120 which binds both to cellular CD4 receptors and to cellular chemokine receptors (such as CCR5).

[0217] The mature gp120 wildtype polypeptides have about 500 amino acids in the primary sequence. gp120 is heavily N-glycosylated giving rise to an apparent molecular weight of 120 kD. The polypeptide is comprised of five conserved regions (C1-C5) and five regions of high variability (V1-V5). Exemplary sequence of wt gp120 polypeptides are shown on GENBANK®, for example accession numbers AAB05604 and AAD12142 (as available on Oct. 16, 2009), incorporated by reference herein. It is understood that there are numerous variation in the sequence of gp120 from what is given in GENBANK®, for example accession numbers AAB05604 and AAD12142, and that these variants are skill recognized in the art as gp120.

[0218] The gp120 core has a molecular structure, which includes two domains: an “inner” domain (which faces gp41) and an “outer” domain (which is mostly exposed on the surface of the oligomeric envelope glycoprotein complex). The two gp120 domains are separated by a “bridging sheet” that is not part of either domain. The gp120 core comprises 25 beta strands, 5 alpha helices, and 10 defined loop segments.

[0219] The third variable region referred to herein as the V3 loop is a loop of about 35 amino acids critical for the binding of the co-receptor and determination of which of the co-receptors will bind. In certain examples the V3 loop comprises residues 296-331.

[0220] The numbering used in gp120 polypeptides disclosed herein is relative to the HXB2 numbering scheme as set forth in Numbering Positions in HIV Relative to HXB2CG Bette Korber et al., Human Retroviruses and AIDS1998: A Compilation and Analysis of Nucleic Acid and Amino Acid Sequences. Korber B, Kuiken C L, Foley B, Hahn B, McCutchan F, Mellors J W, and Sodroski J, Eds. Theoretical Biology and Biophysics Group, Los Alamos National Laboratory, Los Alamos, N M which is incorporated by reference herein in its entirety.

[0221] Host Cells:

[0222] Cells in which a vector can be propagated and its DNA expressed, for example a disclosed antibody can be expressed in a host cell. The cell may be prokaryotic or eukaryotic. The term also includes any progeny of the subject host cell. It is understood that all progeny may not be identical to the parental cell since there may be mutations that occur during replication. However, such progeny are included when the term “host cell” is used.

[0223] Immunoadhesin:

[0224] A molecular fusion of a protein with the Fc region of an immunoglobulin, wherein the immunogloblin retains specific properties, such as Fc receptor binding and increased half-life. An Fc fusion combines the Fc region of an immunoglobulin with a fusion partner, which in general can be any protein, polypeptide, peptide, or small molecule. In one example, and immunoadhesin includes the hinge, CH₂, and CH₃ domains of the immunoglobulin gamma 1 heavy chain constant region. In another example, the immunoadhesin includes the CH₂, and CH₃ domains of an IgG.

[0225] Immunological Probe:

[0226] A molecule that can be used for selection of antibodies from sera which are directed against a specific epitope, including from human patient sera. The epitope scaffolds, along with related point mutants, can be used as immunological probes in both positive and negative selection of antibodies against the epitope graft. In some examples immunological probes are engineered variants of gp120.

[0227] Immunologically Reactive Conditions:

[0228] Includes reference to conditions which allow an antibody raised against a particular epitope to bind to that epitope to a detectably greater degree than, and/or to the substantial exclusion of, binding to substantially all other epitopes. Immunologically reactive conditions are dependent upon the format of the antibody binding reaction and typically are those utilized in immunoassay protocols or those conditions encountered in vivo. See Harlow & Lane, supra, for a description of immunoassay formats and conditions. The immunologically reactive conditions employed in the methods are “physiological conditions” which include reference to conditions (e.g., temperature, osmolarity, pH) that are typical inside a living mammal or a mammalian cell. While it is recognized that some organs are subject to extreme conditions, the intra-organismal and intracellular environment normally lies around pH 7 (e.g., from pH 6.0 to pH 8.0, more typically pH 6.5 to 7.5), contains water as the predominant solvent, and exists at a temperature above 0° C. and below 50° C. Osmolarity is within the range that is supportive of cell viability and proliferation.

[0229] IgA:

[0230] A polypeptide belonging to the class of antibodies that are substantially encoded by a recognized immunoglobulin alpha gene. In humans, this class or isotype comprises IgA₁ and IgA₂. IgA antibodies can exist as monomers, polymers (referred to as pIgA) of predominantly dimeric form, and secretory IgA. The constant chain of wild-type IgA contains an 18-amino-acid extension at its C-terminus called the tail piece (tp). Polymeric IgA is secreted by plasma cells with a 15-kDa peptide called the J chain linking two monomers of IgA through the conserved cysteine residue in the tail piece.

[0231] IgG: A polypeptide belonging to the class or isotype of antibodies that are substantially encoded by a recognized immunoglobulin gamma gene. In humans, this class comprises IgG₁, IgG₂, IgG₃, and IgG₄. In mice, this class comprises IgG₁, IgG₂ₐ, IgG_{2b}, IgG_{3.}

[0232] Inhibiting or Treating a Disease:

[0233] Inhibiting the full development of a disease or condition, for example, in a subject who is at risk for a disease such as acquired immunodeficiency syndrome (AIDS). “Treatment” refers to a therapeutic intervention that ameliorates a sign or symptom of a disease or pathological condition after it has begun to develop. The term “ameliorating,” with reference to a disease or pathological condition, refers to any observable beneficial effect of the treatment. The beneficial effect can be evidenced, for example, by a delayed onset of clinical symptoms of the disease in a susceptible subject, a reduction in severity of some or all clinical symptoms of the disease, a slower progression of the disease, a reduction in the viral load, an improvement in the overall health or well-being of the subject, or by other parameters well known in the art that are specific to the particular disease. A “prophylactic” treatment is a treatment administered to a subject who does not exhibit signs of a disease or exhibits only early signs for the purpose of decreasing the risk of developing pathology.

[0234] Isolated:

[0235] An “isolated” biological component (such as a cell, for example a Bcell, a nucleic acid, peptide, protein or antibody) has been substantially separated, produced apart from, or purified away from other biological components in the cell of the organism in which the component naturally occurs, such as, other chromosomal and extrachromosomal DNA and RNA, and proteins. Nucleic acids, peptides and proteins which have been “isolated” thus include nucleic acids and proteins purified by standard purification methods. The term also embraces nucleic acids, peptides, and proteins prepared by recombinant expression in a host cell as well as chemically synthesized nucleic acids. In some examples an antibody, such as an antibody specific for gp120 can be isolated, for example isolated from a subject infected with HIV.

[0236] In Silico

[0237] A process performed virtually within a computer. For example, using a computer, a virtual compound can be screened for surface similarity or conversely surface complementarity to a virtual representation of the atomic positions at least a portion of a gp120 polypeptide, a gp120 polypeptide in complex with an antibody, a gp41 polypeptide, or a pg41 polypeptide in complex with an antibody.

[0238] K_{d}:

[0239] The dissociation constant for a given interaction, such as a polypeptide ligand interaction or an antibody antigen interaction. For example, for the bimolecular interaction of an antibody (such as VRC01, VRC02, or VRC03) and an antigen (such as gp120) it is the concentration of the individual components of the bimolecular interaction divided by the concentration of the complex.

[0240] Label:

[0241] A detectable compound or composition that is conjugated directly or indirectly to another molecule, such as an antibody or a protein, to facilitate detection of that molecule. Specific, non-limiting examples of labels include fluorescent tags, enzymatic linkages, and radioactive isotopes. In some examples, a disclosed antibody as labeled.

[0242] Neutralizing Antibody:

[0243] An antibody which reduces the infectious titer of an infectious agent by binding to a specific antigen on the infectious agent. In some examples the infectious agent is a virus. In some examples, an antibody that is specific for gp120 neutralizes the infectious titer of HIV.

[0244] Nucleic Acid:

[0245] A polymer composed of nucleotide units (ribonucleotides, deoxyribonucleotides, related naturally occurring structural variants, and synthetic non-naturally occurring analogs thereof) linked via phosphodiester bonds, related naturally occurring structural variants, and synthetic non-naturally occurring analogs thereof. Thus, the term includes nucleotide polymers in which the nucleotides and the linkages between them include non-naturally occurring synthetic analogs, such as, for example and without limitation, phosphorothioates, phosphoramidates, methyl phosphonates, chiral-methyl phosphonates, 2-O-methyl ribonucleotides, peptide-nucleic acids (PNAs), and the like. Such polynucleotides can be synthesized, for example, using an automated DNA synthesizer. The term “oligonucleotide” typically refers to short polynucleotides, generally no greater than about 50 nucleotides. It will be understood that when a nucleotide sequence is represented by a DNA sequence (i.e., A, T, G, C), this also includes an RNA sequence (i.e., A, U, G, C) in which “U” replaces “T.”

[0246] Conventional notation is used herein to describe nucleotide sequences: the left-hand end of a single-stranded nucleotide sequence is the 5′-end; the left-hand direction of a double-stranded nucleotide sequence is referred to as the 5′-direction. The direction of 5′ to 3′ addition of nucleotides to nascent RNA transcripts is referred to as the transcription direction. The DNA strand having the same sequence as an mRNA is referred to as the “coding strand;” sequences on the DNA strand having the same sequence as an mRNA transcribed from that DNA and which are located 5′ to the 5′-end of the RNA transcript are referred to as “upstream sequences;” sequences on the DNA strand having the same sequence as the RNA and which are 3′ to the 3′ end of the coding RNA transcript are referred to as “downstream sequences.”

[0247] “cDNA” refers to a DNA that is complementary or identical to an mRNA, in either single stranded or double stranded form.

[0248] “Encoding” refers to the inherent property of specific sequences of nucleotides in a polynucleotide, such as a gene, a cDNA, or an mRNA, to serve as templates for synthesis of other polymers and macromolecules in biological processes having either a defined sequence of nucleotides (i.e., rRNA, tRNA and mRNA) or a defined sequence of amino acids and the biological properties resulting therefrom. Thus, a gene encodes a protein if transcription and translation of mRNA produced by that gene produces the protein in a cell or other biological system. Both the coding strand, the nucleotide sequence of which is identical to the mRNA sequence and is usually provided in sequence listings, and non-coding strand, used as the template for transcription, of a gene or cDNA can be referred to as encoding the protein or other product of that gene or cDNA. Unless otherwise specified, a “nucleotide sequence encoding an amino acid sequence” includes all nucleotide sequences that are degenerate versions of each other and that encode the same amino acid sequence. Nucleotide sequences that encode proteins and RNA may include introns.

[0249] “Recombinant nucleic acid” refers to a nucleic acid having nucleotide sequences that are not naturally joined together. This includes nucleic acid vectors comprising an amplified or assembled nucleic acid which can be used to transform a suitable host cell. A host cell that comprises the recombinant nucleic acid is referred to as a “recombinant host cell.” The gene is then expressed in the recombinant host cell to produce, e.g., a “recombinant polypeptide.” A recombinant nucleic acid may serve a non-coding function (e.g., promoter, origin of replication, ribosome-binding site, etc.) as well.

[0250] A first sequence is an “antisense” with respect to a second sequence if a polynucleotide whose sequence is the first sequence specifically hybridizes with a polynucleotide whose sequence is the second sequence.

[0251] Terms used to describe sequence relationships between two or more nucleotide sequences or amino acid sequences include “reference sequence,” “selected from,” “comparison window,” “identical,” “percentage of sequence identity,” “substantially identical,” “complementary,” and “substantially complementary.”

[0252] For sequence comparison of nucleic acid sequences, typically one sequence acts as a reference sequence, to which test sequences are compared. When using a sequence comparison algorithm, test and reference sequences are entered into a computer, subsequence coordinates are designated, if necessary, and sequence algorithm program parameters are designated. Default program parameters are used. Methods of alignment of sequences for comparison are well known in the art. Optimal alignment of sequences for comparison can be conducted, e.g., by the local homology algorithm of Smith & Waterman, Adv. Appl. Math. 2:482, 1981, by the homology alignment algorithm of Needleman & Wunsch, J. Mol. Biol. 48:443, 1970, by the search for similarity method of Pearson & Lipman, Proc. Nat'l. Acad. Sci. USA 85:2444, 1988, by computerized implementations of these algorithms (GAP, BESTFIT, FASTA, and TFASTA in the Wisconsin Genetics Software Package, Genetics Computer Group, 575 Science Dr., Madison, Wis.), or by manual alignment and visual inspection (see, e.g., Current Protocols in Molecular Biology (Ausubel et al., eds 1995 supplement)).

[0253] One example of a useful algorithm is PILEUP. PILEUP uses a simplification of the progressive alignment method of Feng & Doolittle, J. Mol. Evol. 35:351-360, 1987. The method used is similar to the method described by Higgins & Sharp, CABIOS 5:151-153, 1989. Using PILEUP, a reference sequence is compared to other test sequences to determine the percent sequence identity relationship using the following parameters: default gap weight (3.00), default gap length weight (0.10), and weighted end gaps. PILEUP can be obtained from the GCG sequence analysis software package, e.g., version 7.0 (Devereaux et al., Nuc. Acids Res. 12:387-395, 1984.

[0254] Another example of algorithms that are suitable for determining percent sequence identity and sequence similarity are the BLAST and the BLAST 2.0 algorithm, which are described in Altschul et al., J. Mol. Biol. 215:403-410, 1990 and Altschul et al., Nucleic Acids Res. 25:3389-3402, 1977. Software for performing BLAST analyses is publicly available through the National Center for Biotechnology Information (ncbi.nlm.nih.gov). The BLASTN program (for nucleotide sequences) uses as defaults a word length (W) of 11, alignments (B) of 50, expectation (E) of 10, M=5, N=−4, and a comparison of both strands. The BLASTP program (for amino acid sequences) uses as defaults a word length (W) of 3, and expectation (E) of 10, and the BLOSUM62 scoring matrix (see Henikoff & Henikoff, Proc. Natl. Acad. Sci. USA 89:10915, 1989). An oligonucleotide is a linear polynucleotide sequence of up to about 100 nucleotide bases in length.

[0255] A polynucleotide or nucleic acid sequence refers to a polymeric form of nucleotide at least 10 bases in length. A recombinant polynucleotide includes a polynucleotide that is not immediately contiguous with both of the coding sequences with which it is immediately contiguous (one on the 5′ end and one on the 3′ end) in the naturally occurring genome of the organism from which it is derived. The term therefore includes, for example, a recombinant DNA which is incorporated into a vector; into an autonomously replicating plasmid or virus; or into the genomic DNA of a prokaryote or eukaryote, or which exists as a separate molecule (e.g., a cDNA) independent of other sequences. The nucleotides can be ribonucleotides, deoxyribonucleotides, or modified forms of either nucleotide. The term includes single- and double-stranded forms of DNA. A gp120 polynucleotide is a nucleic acid encoding a gp120 polypeptide.

[0256] Pharmaceutically Acceptable Carriers:

[0257] The pharmaceutically acceptable carriers of use are conventional. Remington's Pharmaceutical Sciences, by E. W. Martin, Mack Publishing Co., Easton, Pa., 19th Edition, 1995, describes compositions and formulations suitable for pharmaceutical delivery of the antibodies herein disclosed.

[0258] In general, the nature of the carrier will depend on the particular mode of administration being employed. For instance, parenteral formulations usually comprise injectable fluids that include pharmaceutically and physiologically acceptable fluids such as water, physiological saline, balanced salt solutions, aqueous dextrose, glycerol or the like as a vehicle. For solid compositions (e.g., powder, pill, tablet, or capsule forms), conventional non-toxic solid carriers can include, for example, pharmaceutical grades of mannitol, lactose, starch, or magnesium stearate. In addition to biologically neutral carriers, pharmaceutical compositions to be administered can contain minor amounts of non-toxic auxiliary substances, such as wetting or emulsifying agents, preservatives, and pH buffering agents and the like, for example sodium acetate or sorbitan monolaurate.

[0259] Pharmaceutical Agent:

[0260] A chemical compound or composition capable of inducing a desired therapeutic or prophylactic effect when properly administered to a subject or a cell. In some examples a pharmaceutical agent includes one one or more of the disclosed antibodies.

[0261] Polypeptide:

[0262] Any chain of amino acids, regardless of length or post-translational modification (e.g., glycosylation or phosphorylation). In one embodiment, the polypeptide is gp120 polypeptide. In another embodiment, the polypeptide is gp41 polypeptide. In one embodiment, the polypeptide is a disclosed antibody or a fragment thereof. A “residue” refers to an amino acid or amino acid mimetic incorporated in a polypeptide by an amide bond or amide bond mimetic. A polypeptide has an amino terminal (N-terminal) end and a carboxy terminal end.

[0263] Purified:

[0264] The term purified does not require absolute purity; rather, it is intended as a relative term. Thus, for example, a purified peptide preparation is one in which the peptide or protein (such as an antibody) is more enriched than the peptide or protein is in its natural environment within a cell. In one embodiment, a preparation is purified such that the protein or peptide represents at least 50% of the total peptide or protein content of the preparation.

[0265] Recombinant:

[0266] A recombinant nucleic acid is one that has a sequence that is not naturally occurring or has a sequence that is made by an artificial combination of two otherwise separated segments of sequence. This artificial combination is often accomplished by chemical synthesis or, more commonly, by the artificial manipulation of isolated segments of nucleic acids, e.g., by genetic engineering techniques.

[0267] Sequence Identity:

[0268] The similarity between amino acid sequences is expressed in terms of the similarity between the sequences, otherwise referred to as sequence identity. Sequence identity is frequently measured in terms of percentage identity (or similarity or homology); the higher the percentage, the more similar the two sequences are. Homologs or variants of a polypeptide will possess a relatively high degree of sequence identity when aligned using standard methods.

[0269] Methods of alignment of sequences for comparison are well known in the art. Various programs and alignment algorithms are described in: Smith and Waterman, Adv. Appl. Math. 2:482, 1981; Needleman and Wunsch, J. Mol. Biol. 48:443, 1970; Pearson and Lipman, Proc. Natl. Acad. Sci. U.S.A. 85:2444, 1988; Higgins and Sharp, Gene 73:237, 1988; Higgins and Sharp, CABIOS 5:151, 1989; Corpet et al., Nucleic Acids Research 16:10881, 1988; and Pearson and Lipman, Proc. Natl. Acad. Sci. U.S.A. 85:2444, 1988. Altschul et al., Nature Genet. 6:119, 1994, presents a detailed consideration of sequence alignment methods and homology calculations.

[0270] The NCBI Basic Local Alignment Search Tool (BLAST) (Altschul et al., J. Mol. Biol. 215:403, 1990) is available from several sources, including the National Center for Biotechnology Information (NCBI, Bethesda, Md.) and on the internet, for use in connection with the sequence analysis programs blastp, blastn, blastx, tblastn and tblastx. A description of how to determine sequence identity using this program is available on the NCBI website on the internet.

[0271] Homologs and variants of a V_{L} or a V_{H} of an antibody that specifically binds a polypeptide are typically characterized by possession of at least about 75%, for example at least about 80%, 85%, 90%, 91%, 92%, 93%, 94%, 95%, 96%, 97%, 98% or 99% sequence identity counted over the full length alignment with the amino acid sequence of interest. Proteins with even greater similarity to the reference sequences will show increasing percentage identities when assessed by this method, such as at least 80%, at least 85%, at least 90%, at least 95%, at least 98%, or at least 99% sequence identity. When less than the entire sequence is being compared for sequence identity, homologs and variants will typically possess at least 80% sequence identity over short windows of 10-20 amino acids, and may possess sequence identities of at least 85% or at least 90% or 95% depending on their similarity to the reference sequence. Methods for determining sequence identity over such short windows are available at the NCBI website on the internet. One of skill in the art will appreciate that these sequence identity ranges are provided for guidance only; it is entirely possible that strongly significant homologs could be obtained that fall outside of the ranges provided.

[0272] Specifically Bind:

[0273] When referring to an antibody, refers to a binding reaction which determines the presence of a target protein, peptide, or polysaccharide in the presence of a heterogeneous population of proteins and other biologics. Thus, under designated conditions, an antibody binds preferentially to a particular target protein, peptide or polysaccharide (such as an antigen present on the surface of a pathogen, for example gp120) and do not bind in a significant amount to other proteins or polysaccharides present in the sample or subject. Specific binding can be determined by methods known in the art. With reference to an antibody antigen complex, specific binding of the antigen and antibody has a K_{d} of less than about 10⁻⁶ Molar, such as less than about 10⁻⁶ Molar, 10⁻⁷ Molar, 10⁻⁸ Molar, 10⁻⁹, or even less than about 10⁻¹⁹ Molar.

[0274] Therapeutic Agent:

[0275] Used in a generic sense, it includes treating agents, prophylactic agents, and replacement agents.

[0276] Therapeutically Effective Amount:

[0277] A quantity of a specific substance, such as a disclosed antibody, sufficient to achieve a desired effect in a subject being treated. For instance, this can be the amount necessary to inhibit HIV replication or treat AIDS. In several embodiments, a therapeutically effective amount is the amount necessary to reduce a sign or symptom of AIDS, and/or to decrease viral titer in a subject. When administered to a subject, a dosage will generally be used that will achieve target tissue concentrations that has been shown to achieve a desired in vitro effect.

[0278] T Cell:

[0279] A white blood cell critical to the immune response. T cells include, but are not limited to, CD4⁺ T cells and CD8⁺ T cells. A CD4⁺ T lymphocyte is an immune cell that carries a marker on its surface known as “cluster of differentiation 4” (CD4). These cells, also known as helper T cells, help orchestrate the immune response, including antibody responses as well as killer T cell responses. CD8⁺ T cells carry the “cluster of differentiation 8” (CD8) marker. In one embodiment, a CD8 T cells is a cytotoxic T lymphocytes. In another embodiment, a CD8 cell is a suppressor T cell.

[0280] Vector:

[0281] A nucleic acid molecule as introduced into a host cell, thereby producing a transformed host cell. A vector may include nucleic acid sequences that permit it to replicate in a host cell, such as an origin of replication. A vector may also include one or more selectable marker genes and other genetic elements known in the art.

[0282] Virus:

[0283] Microscopic infectious organism that reproduces inside living cells. A virus consists essentially of a core of a single nucleic acid surrounded by a protein coat, and has the ability to replicate only inside a living cell. “Viral replication” is the production of additional virus by the occurrence of at least one viral life cycle. A virus may subvert the host cells' normal functions, causing the cell to behave in a manner determined by the virus. For example, a viral infection may result in a cell producing a cytokine, or responding to a cytokine, when the uninfected cell does not normally do so.

[0284] “Retroviruses” are RNA viruses wherein the viral genome is RNA. When a host cell is infected with a retrovirus, the genomic RNA is reverse transcribed into a DNA intermediate which is integrated very efficiently into the chromosomal DNA of infected cells. The integrated DNA intermediate is referred to as a provirus. The term “lentivirus” is used in its conventional sense to describe a genus of viruses containing reverse transcriptase. The lentiviruses include the “immunodeficiency viruses” which include human immunodeficiency virus (HIV) type 1 and type 2 (HIV-I and HIV-II), simian immunodeficiency virus (SIV), and feline immunodeficiency virus (FIV).

[0285] HIV-I is a retrovirus that causes immunosuppression in humans (HIV disease), and leads to a disease complex known as the acquired immunodeficiency syndrome (AIDS). “HIV disease” refers to a well-recognized constellation of signs and symptoms (including the development of opportunistic infections) in persons who are infected by an HIV virus, as determined by antibody or western blot studies. Laboratory findings associated with this disease are a progressive decline in T cells.

### II. Description of Several Embodiments

[0286] A. Neutralizing Monoclonal Antibodies

[0287] Isolated human monoclonal antibodies that specifically bind gp120 or gp41 are disclosed herein. Also disclosed herein are compositions including these human monoclonal antibodies and a pharmaceutically acceptable carrier. Nucleic acids encoding these antibodies, expression vectors comprising these nucleic acids, and isolated host cells that express the nucleic acids are also provided.

[0288] Compositions comprising the human monoclonal antibodies specific for gp120 or gp41 can be used for research, diagnostic and therapeutic purposes. For example, the human monoclonal antibodies disclosed herein can be used to diagnose or treat a subject having an HIV-1 infection and/or AIDS. For example, the antibodies can be used to determine HIV-1 titer in a subject. The antibodies disclosed herein also can be used to study the biology of the human immunodeficiency virus.

[0289] In some embodiments, the isolated human monoclonal antibody specifically binds gp120, and includes a heavy chain with amino acids 26-33 (CDR1), 51-58 (CDR2), and 97-110 (CDR3) of SEQ ID NO: 1. In specific examples, the heavy chain of the human monoclonal antibody includes SEQ ID NO: 1. In additional examples, the heavy chain of the monoclonal antibody includes SEQ ID NO: 3. In another example, the isolated human monoclonal antibody specifically binds gp120, and includes a heavy chain with amino acids 26-33 (CDR1), 51-58 (CDR2), and 97-110 (CDR3) of SEQ ID NO: 1 and the light chain of the antibody includes amino acids 27-30 (CDR1), 48-50 (CDR2), and 87-91 (CDR3) of SEQ ID NO: 2. In additional embodiments, the isolated human monoclonal antibody specifically binds gp120 and the light chain of the antibody includes amino acids 27-30 (CDR1), 48-50 (CDR2), and 87-91 (CDR3) of SEQ ID NO: 2. In specific examples, the light chain of the antibody includes SEQ ID NO: 2. In additional examples, the light chain of the antibody includes SEQ ID NO: 4.

[0290] In further embodiments, the isolated human monoclonal antibody specifically binds gp120, and includes a heavy chain with at most one, at most two, at most three or at most four amino acid substitutions in amino acids 26-33 (CDR1), 51-58 (CDR2), and 97-110 (CDR3) of SEQ ID NO: 1, and a light chain. In some embodiments, the antibody can include a heavy chain with at most one, at most two, at most three or at most four amino acid substitutions in amino acids in 26-33 (CDR1), 51-58 (CDR2), and 97-110 (CDR3) of SEQ ID NO: 1, and can include a light chain that includes amino acids 27-30 (CDR1), 48-50 (CDR2), and 87-91 (CDR3) of SEQ ID NO: 2. In some embodiments, the antibody can include a heavy chain with at most one, at most two, at most three or at most four amino acid substitutions amino acids in 26-33 (CDR1), 51-58 (CDR2), and 97-110 (CDR3) of SEQ ID NO: 1, and can include a light chain with at most one, at most two, at most three or at most four amino acid substitutions in amino acids 27-30 (CDR1), 48-50 (CDR2), and 87-91 (CDR3) of SEQ ID NO: 2.

[0291] The antibody can include a heavy chain with at most one, at most two, at most three or at most four amino acid substitutions amino acids in 26-33 (CDR1), 51-58 (CDR2), and 97-110 (CDR3) of SEQ ID NO: 1 and a light chain that can include SEQ ID NO: 2 or SEQ ID NO: 4. In some examples, these antibodies retain the binding affinity of the parental antibody (VRC01 or VRC02) for the antigenic epitope. Thus, in some examples, these antibodies have a KD of <3 nM for the antigenic epitope of gp120.

[0292] In another set of embodiments, the isolated human monoclonal antibody specifically binds gp120, and the light chain of the antibody includes at most one, at most two, at most three or at most four substitutions in amino acids 27-30 (CDR1), 48-50 (CDR2), and 87-91 (CDR3) of SEQ ID NO: 2. It should be noted that no more than three substitutions can be made in CDR2. The isolated monoclonal antibody can include a heavy chain that includes amino acids 26-33 (CDR1), 51-58 (CDR2), and 97-110 (CDR3) of SEQ ID NO: 1 and the light chain of the antibody can include at most one, at most two, at most three or at most four substitutions in amino acids 27-30 (CDR1), 48-50 (CDR2), and 87-91 (CDR3) of SEQ ID NO: 2. It should be noted that no more than three substitutions can be made in CDR2. The antibody can include a heavy chain including the amino acid sequence set forth as SEQ ID NO: 1 or SEQ ID NO: 3, and a light chain that includes SEQ ID NO: 2 with at most one, at most two, at most three or at most four substitutions in amino acids 27-30 (CDR1), 48-50 (CDR2), and 87-91 (CDR3) of SEQ ID NO: 2. It should be noted that no more than three substitutions can be made in CDR2. In some examples, these antibodies retain the binding affinity of the parental antibody (VRC01 or VRC02) for the antigenic epitope. Thus, in some examples, these antibodies have a K_{D} of <3 nM for the antigenic epitope of gp120.

[0293] In some embodiments, the isolated human monoclonal antibody specifically binds gp120, and includes a heavy chain with amino acids 26-35 (CDR1), 50-66 (CDR2), and 106-119 (CDR3) of SEQ ID NO: 27. In specific examples, the heavy chain of the human monoclonal antibody includes SEQ ID NO: 27. In another example, the isolated human monoclonal antibody specifically binds gp120, and includes a heavy chain with amino acids 26-35 (CDR1), 50-66 (CDR2), and 106-119 (CDR3) of SEQ ID NO: 27 and a light chain that includes amino acids 24-33 (CDR1), 49-55 (CDR2), and 88-92 (CDR3) of SEQ ID NO: 28.

[0294] In further embodiments, the isolated human monoclonal antibody specifically binds gp120, and includes a heavy chain with at most one, at most two, at most three or at most four amino acid substitutions in amino acids 26-35 (CDR1), 50-66 (CDR2), and 106-119 (CDR3) of SEQ ID NO: 27, and a light chain. The antibody can include a heavy chain with at most one, at most two, at most three or at most four amino acid substitutions amino acids in 26-35 (CDR1), 50-66 (CDR2), and 106-119 (CDR3) of SEQ ID NO: 27, and a light chain that includes amino acids 24-33 (CDR1), 49-55 (CDR2), and 88-92 (CDR3) of SEQ ID NO: 28. The antibody can include a heavy chain with at most one, at most two, at most three or at most four amino acid substitutions amino acids in 26-35 (CDR1), 50-66 (CDR2), and 106-119 (CDR3) of SEQ ID NO: 27 and the light chain of the antibody can include SEQ ID NO: 28. In some examples, these antibodies retain the binding affinity of the parental antibody (VRC03) for the antigenic epitope.

[0295] In another set of embodiments, the isolated human monoclonal antibody specifically binds gp120, and the light chain of the antibody includes at most one, at most two, at most three or at most four substitutions in amino acids 24-33 (CDR1), 49-55 (CDR2), and 88-92 (CDR3) of SEQ ID NO: 28. The isolated monoclonal antibody can include a heavy chain that includes 26-35 (CDR1), 50-66 (CDR2), and 106-119 (CDR3) of SEQ ID NO: 27 and a light chain that include at most one, at most two, at most three or at most four substitutions in amino acids 24-33 (CDR1), 49-55 (CDR2), and 88-92 (CDR3) of SEQ ID NO: 28. The antibody can include a heavy chain including the amino acid sequence set forth as SEQ ID NO: 27, and a light chain that includes at most one, at most two, at most three or at most four substitutions in amino acids 24-33 (CDR1), 49-55 (CDR2), and 88-92 (CDR3) of SEQ ID NO: 28. In some examples, these antibodies retain the binding affinity of the parental antibody (VRC03) for the antigenic epitope. In additional embodiments, the isolated human monoclonal antibody specifically binds gp120 and the light chain of the antibody includes amino acids 24-33 (CDR1), 49-55 (CDR2), and 88-92 (CDR3) of SEQ ID NO: 28. In specific examples, the light chain of the antibody includes SEQ ID NO: 28.

[0296] In some embodiments, the isolated human monoclonal antibody specifically binds gp120, and includes a heavy chain with CDR1, CDR2, and CDR3 of any one of SEQ ID NOs: 760-1459. In specific examples, the heavy chain of the human monoclonal antibody includes any one of SEQ ID NOs: 760-1459. In some embodiments, the isolated human monoclonal antibody specifically binds gp120, and includes a heavy chain with CDR1, CDR2, and CDR3 of SEQ ID NO: 1316. In specific examples, the heavy chain of the human monoclonal antibody includes the amino acids set forth as SEQ ID NO: 1316.

[0297] VRC01 and VRC03-like antibodies share unique binding site on the surface of gp120. Thus, in some embodiments, the antibody specifically binds to an epitope on the surface of gp120 that includes, residues 276, 278-283, 365-368, 371, 455-459, 461, 469, and 472-474 of gp120 or a subset or combination thereof (see FIGs. see FIGS. 83-91 and 93-97, the numbering of gp120 according to the HXBC2 convention is shown in FIG. 91). With reference to FIG. 91. VRC01 and VRC0-like antibodies bind to the epitope defined by residues N₂₇₆.T₂₇₈NNAKT₂₈₃.S₃₆₅GGD₃₆₈.I₃₇₁ . . . T₄₅₅RDGG₄₅₉.N₄₆₁.R₄₆₉.G₄₇₂GN₄₇₄ in gp120, which correspond to amino acid positions 169, 171-176, 229-232, 235, 319-323, 325, 333, 336-338 in SEQ ID NO: 45. The heavy chain of a VRC01 or VRC03-like antibody can be complemented by the light chain of VRC01, VRC02 and/or VRC03 and still retain binding for gp120, for example retain specific binding for residues 276, 278-283, 365-368, 371, 455-459, 461, 469, and 472-474 of gp120 (see FIGS. 83-91 and 93-97). Thus, in some embodiments, a disclosed antibody includes the heavy chain CDRs from any one of SEQ ID NOs: 1, 3, 27, and 760-1459 and a light chain from any one of SEQ ID NOs: 2, 4, and 28 and wherein the antibody specifically binds to residues 276, 278-283, 365-368, 371, 455-459, 461, 469, and 472-474 of gp120. In some embodiments, a disclosed antibody includes the heavy chain set forth as any one of SEQ ID NOs: 1, 3, 27, and 760-1459 and a light chain set forth as any one of SEQ ID NOs: 2, 4, and 28 and wherein the antibody specifically binds to residues 276, 278-283, 365-368, 371, 455-459, 461, 469 and 472-474 of gp120.

[0298] HIV-1 resists neutralization by most antibodies. However, the antibody VRC01, disclosed herein, successfully neutralizes over 90% of current circulating HIV-1 isolates. Another antibody disclosed herein, VRC03, successfully neutralizes over 50% of current circulating HIV-1 isolates. Antibodies VRC01 and VRC03 share only about 50% sequence identity in their variable domains, and there are a number of differences in their activity, including differential induction of antibody 17b binding and CCRS recognition (VRC01 induces these, whereas VRC03 does not). Nonetheless, crystal structures of VRC01 and VRC03 show virtual identical arrangements of heavy chain and light chain recognition of HIV-1 gp120. The similar recognition by VRC01 and VRC03 antibodies of gp120 indicate that they are members of a class of antibodies, are able to recognize and to neutralize HIV-1 through a similar mode of binding. Thus, these two antibodies, along with the third antibody VRC02 are representative members of a class of antibodies known as VRC01-like antibodies. Thus, disclosed herein are VRC01-like antibodies. While VRC01, VRC02 and VRC03 are representative members of this class of antibodies, using 454 sequencing, 700 additional VRC01 and VRC03-like antibodies have been identified. SEQ ID NOs: 60-759 are nucleic acid sequences encoding the heavy chains of VRC01 and VRC03 like antibodies. SEQ ID NOs: 760-1459 are amino acid sequences the heavy chains of VRC01 and VRC03 like antibodies.

[0299] The heavy and light chains of VRC01 and VRC03 can be swapped for partial complementation .For example, the VRC01 light chain and VRC03 heavy chain form active antibodies able to recognize HIV-1. In addition the VRC01 heavy chain and VRC03 light chain form active antibodies that recognize HIV-1. Thus, disclosed herein are VCR01-like antibodies that can be identified by complementation of the heavy or light chains of VCR01 and VCR03. For example, using complementation, the heavy chain amino acid sequences of SEQ ID NOs: 760-1459 are demonstrated to be VRC01 and VRC03-like antibodies that specifically bind gp120. Analysis of these antibodies found a number of sequences, of less than 75% to either VRC01 or VRC03 antibodies, which bioinformatics analysis indicate recognize and neutralize HIV-1. Thus, disclosed herein is a class ofantibodies, VRC01-like antibodies, that recognize and neutralize HIV-1. Deep sequencing of heavy chains related to VRC01 in HIV-1 infected individuals with high CD4-binding-site antibody titers reveles sequences, for which bioinformatics analysis enables quick identification of those which can bind and neutralize HIV-1, for example as a way to facilitate antibody discovery. In some embodiments, the VRC01 and VRC03-like antibodies, and other VRC01-like antibodies compete with CD4 for binding to gp120.

[0300] As disclosed herein, deep sequencing results define the variation allowed for VRC01-like recognition, and relating this to germ-line VH sequences, which delineated maturation pathways to elicit additional neutralizing antibodies that bind to substantially similar epitopes on the surface of gp120 in substantially the same orientation that VRC01, VRC02 and/or VRC03 bind. Thus a method is disclosed herein to determine if antibodies are in the same class specifically ising complementation of antibody H/L for function. For example, if chimeras of one antibody heavy chain with another's light chain (and vice-versa) allows for preservation of binding and neutralization, those two antibodies bind/function in the same mode and thus are members of the same class. Thus, any antibody that preserves antigen binding or HIV neutralization function by chain complementation with VRC01, VRC02 and/or VRC03 is considered a VRC01-like antibody.

[0301] The present disclosure also relates to the crystals obtained from the VRC03 or VRC01 antibody or portions thereof in complex with gp120, the crystal structures of the VRC03 or VRC01 antibody or portions thereof in complex with gp120, the three-dimensional coordinates of the VRC03 or VRC01 antibody or portions thereof in complex with gp120 and three-dimensional structures of models of the VRC03 or VRC01 antibody or portions thereof in complex with gp120. The three dimensional coordinates of VRC01 in complex with gp120 are available at the Protein Data Bank, at accession number 3NGB, and are incorporated herein by reference in their entirety as available Jul. 7, 2010. The three dimensional coordinates of VRC03 in complex with gp120 are given in Table 1 of Provisional Application No. 61/402,314, filed Aug. 27, 2010, and are incorporated herein by reference in their entirety.

[0302] The crystal structure of the VRC03 or the VRC01 antibody in complex with gp120 provides insight for a novel binding mode for antibodies and gp120. Such a novel binding mode establishes a new class of antibody recognition for gp120 that is indicative of a novel class of gp120 antibodies, as exemplified by VRC01, VRC02 and VRC03. Such antibodies are termed VRC01-like antibodies. In certain embodiments a VRC01-like antibody has a relative angle and orientation of binding of gp120 as shown in the crystal structure of the complex of the VRCR03 antibody and gp120 (see FIG. 2d of Zhou et al., “Structural Basis for Broad and Potent Neutralization of HIV-1 by Antibody VRC01, Science 329, 811-817 (2010), which is incorporated herein by reference in its entirety). In some examples, the VRC01-like antibodies partially mimic the binding of the CD4 receptor, with an about 6 Å shift and an about 43 degree rotation from the CD4-defined position (see FIG. 2d of Zhou et al., “Structural Basis for Broad and Potent Neutralization of HIV-1 by Antibody VRC01, Science 329, 811-817 (2010), which is incorporated herein by reference in its entirety), such as about a 45 degree rotation from the CD4-defined binding, for example about a 40 degree rotation, about a 50 degree rotation, about a 35 degree rotation or about a 55 degree rotation. In some examples, a VRC01-like antibody is an antibody with heavy and light chain in an orientation of heavy chain relative to gp120, that differs by less than 10 about degrees, such as less than about 9 about degrees, less than about 8 about degrees, less than about 7 about degrees, less than about 6 about degrees, less than about 5 about degrees, or less than about 4 degrees and/or less than about a 5 Å translation from the binding angle of VRC01 and/or VRC03 to gp120, such as less than about a 5 Å translation, such as less than about a 4 Å translation, than about a 3 Å translation, less than about a 2 Å translation, or less than about a 2 Å translation. Such a binding characteristic can readily be determined from the crystal structure of the VRC03 or VRC01 antibody complex.

[0303] Those of skill in the art will understand that a set of structure coordinates for the VRC01 or VRC03 antibody or portions thereof in complex with gp120 or a portion thereof, is a relative set of points that define a shape in three dimensions. Thus, it is possible that an entirely different set of coordinates could define a similar or identical shape. Moreover, slight variations in the individual coordinates will have little effect on overall shape. The variations in coordinates discussed above may be generated because of mathematical manipulations of the structure coordinates.

[0304] This disclosure further provides systems, such as computer systems, intended to generate structures and/or perform rational drug or compound design for an antigenic compound capable of eliciting an immune response in a subject. The system can contain one or more or all of: atomic co-ordinate data according to VRC03 or VRC01 antibody complex or a subset thereof, and the figures derived therefrom by homology modeling, the data defining the three-dimensional structure of a VRC03 or VRC01 antibody complex or at least one sub-domain thereof, or structure factor data for gp120, the structure factor data being derivable from the atomic co-ordinate data of VRC03 or VRC01 antibody complex or a subset thereof and the figures.

[0305] In some embodiments the CDR H2 region (the C″ strand in particular) forms hydrogen-bonds to the b-15 loop of gp120. In some embodiments Asp 368 of gp120 forms a salt-bridge with Arg 71 of the heavy chain. All VRC01-like antibodies need to mimic CD4 with similar heavy chain orientations.

[0306] In some embodiments, the human monoclonal antibody specifically binds gp41. Thus, antibodies are provided herein wherein the heavy chain of the antibody comprises SEQ ID NO: 5 wherein one or more of amino acids 106, 107, or 109 of SEQ ID NO: 5 are substituted with a tryptophan. In one example, only amino acid 106 of SEQ ID NO: 5 is substituted with a tryptophan. In another example, only amino acid 107 is substituted for a tryptophan. In an additional example, amino acids 106 and 109 are substituted with a tryptophan. In some embodiments, the human monoclonal antibody comprises the heavy chain amino acid sequence set forth as SEQ ID NOs: 6, 7, 8 or 9.

[0307] In a further example, the human monoclonal antibody specifically binds gp41, and includes a heavy chain comprising the amino acid sequence set forth as SEQ ID NO: 5 wherein one or more of amino acids 106, 107, or 109 of SEQ ID NO: 5 are substituted with a tryptophan, and includes a light chain that includes the amino acid sequence set forth as SEQ ID NO: 10.

[0308] The heavy and the light chain are selected so that the antibody specifically binds either gp120 or gp41. In one example, the antibody specifically binds gp120 and includes the CDRs of the heavy chain amino acid sequence set forth as one of SEQ ID NO: 1, SEQ ID NO: 3 or SEQ ID NO: 27 or any one of SEQ ID NOs: 760-1459 and the CDRs of the light chain amino acid sequence set forth as one of SEQ ID NO: 2, SEQ ID NO: 4 or SEQ ID NO: 28. Thus, the antibody can specifically bind gp120 and includes the heavy chain amino acid sequence set forth as one of SEQ ID NO: 1, SEQ ID NO: 3 or SEQ ID NO: 27 or any one of SEQ ID NOs: 760-1459, and the light chain amino acid sequence set forth as one of SEQ ID NO: 2, SEQ ID NO: 4 or SEQ ID NO: 28.

[0309] In another example, the antibody specifically binds gp41. Thus, the antibody can include the CDRs of the heavy chain amino acid sequence set forth as one of SEQ ID NO: 6-9 and the CDRs of the light chain amino acid sequence set forth as one of SEQ ID NO: 10. The antibody can include the heavy chain amino acid sequence set forth as one of SEQ ID NOs: 6-9 and the light chain amino acid sequence set forth as SEQ ID NO: 10.

[0310] Fully human monoclonal antibodies include human framework regions. Thus, any of the antibodies that specifically bind gp120 or gp41 herein can include the human framework region and can include the framework regions of the amino acid sequence set forth in one of SEQ ID NOs: 1-10, 27 and 28. However, the framework regions can be from another source. Additional examples of framework sequences that can be used include the amino acid framework sequences of the heavy and light chains disclosed in PCT Publication No. WO 2006/074071 (see, for example, SEQ ID NOs: 1-16), which is herein incorporated by reference.

[0311] The monoclonal antibody can be of any isotype. The monoclonal antibody can be, for example, an IgM or an IgG antibody, such as IgG₁or an IgG₂. The class of an antibody that specifically binds gp120 or gp41 can be switched with another. In one aspect, a nucleic acid molecule encoding V_{L} or V_{H} is isolated using methods well-known in the art, such that it does not include any nucleic acid sequences encoding the constant region of the light or heavy chain, respectively.

[0312] In particular examples, the V_{H} amino acid sequence is SEQ ID NOs: 1, 3, 5, 6, 7, 8, 9, 27 or any one of 760-1459. In other examples, the V_{L} amino acid sequence is SEQ ID NOs: 2, 4, 6, 10 or 28. In further examples, the V_{H} nucleic acid sequence is SEQ ID NOs: 29, 31 or 33. In other examples, the V_{L} nucleic acid sequence is SEQ ID NOs: 30, 32 or 34. The nucleic acid molecule encoding V_{L} or V_{H} is then operatively linked to a nucleic acid sequence encoding a C_{L} or C_{H} from a different class of immunoglobulin molecule. This can be achieved using a vector or nucleic acid molecule that comprises a C_{L} or C_{H} chain, as known in the art. For example, an antibody that specifically binds gp120, such as VRC01, VRC02 or VRC03, that was originally IgM may be class switched to an IgG. Similar class switches can also be achieved with an antibody that specifically binds gp41, such as 2F5, or any of its variants described herein. Class switching can be used to convert one IgG subclass to another, such as from IgG₁ to IgG₂.

[0313] In some examples, the disclosed and antibodies are oligomers of antibodies, such as dimers trimers, tetramers, pentamers, hexamers, septamers, octomers and so on. In some examples, the antibodies are pentamers, for example pentamers of VRC01, VRC03, VRC02, or VRC01 and VRC03 like antibodies. Is a specific example the antibody is a a pentameric IgM antibody carrying the VRC01 V region (see e.g. FIG. 92).

[0314] By definition, the CDRs of the light chain are bounded by the residues at positions 24 and 34 (L-CDR1), 50 and 56 (L-CDR2), 89 and 97 (L-CDR3); the CDRs of the heavy chain are bounded by the residues at positions 31 and 35b (H-CDR1), 50 and 65 (H-CDR2), 95 and 102 (H-CDR3), using the numbering convention delineated by Kabat et al., (1991) Sequences of Proteins of Immunological Interest, 5^{th} Edition, U.S. Department of Health and Human Services, Public Health Service, National Institutes of Health, Bethesda, Md. (NIH Publication No. 91-3242, which is specifically incorporated herein by reference in its entirety).

[0315] Antibody fragments are encompassed by the present disclosure, such as Fab, F(ab′)₂, and Fv which include a heavy chain and light chain variable region and specifically bind gp120 or gp41. These antibody fragments retain the ability to selectively bind with the antigen. These fragments include:

[0316] (1) Fab, the fragment which contains a monovalent antigen-binding fragment of an antibody molecule, can be produced by digestion of whole antibody with the enzyme papain to yield an intact light chain and a portion of one heavy chain;

[0317] (2) Fab′, the fragment of an antibody molecule can be obtained by treating whole antibody with pepsin, followed by reduction, to yield an intact light chain and a portion of the heavy chain; two Fab′ fragments are obtained per antibody molecule;

[0318] (3) (Fab′)₂, the fragment of the antibody that can be obtained by treating whole antibody with the enzyme pepsin without subsequent reduction; F(ab′)₂ is a dimer of two Fab′ fragments held together by two disulfide bonds;

[0319] (4) Fv, a genetically engineered fragment containing the variable region of the light chain and the variable region of the heavy chain expressed as two chains; and

[0320] (5) Single chain antibody (such as scFv), defined as a genetically engineered molecule containing the variable region of the light chain, the variable region of the heavy chain, linked by a suitable polypeptide linker as a genetically fused single chain molecule.

[0321] (6) A dimer of a single chain antibody (scFV₂), defined as a dimer of a scFV. This has also been termed a “miniantibody.”

[0322] Methods of making these fragments are known in the art (see for example, Harlow and Lane, Antibodies: A Laboratory Manual, Cold Spring Harbor Laboratory, New York, 1988). In several examples, the variable region included in the antibody is the variable region of m912.

[0323] In a further group of embodiments, the antibodies are Fv antibodies, which are typically about 25 kDa and contain a complete antigen-binding site with three CDRs per each heavy chain and each light chain. To produce these antibodies, the V_{H} and the V_{L} can be expressed from two individual nucleic acid constructs in a host cell. In particular examples, the V_{H} amino acid sequence includes the CDRs from one of SEQ ID NOs: 1, 3, 5, 6, 7, 8, 9 or 27, or any one of 760-1459. In other examples, the V_{L} amino acid sequence includes the CDRs from SEQ ID NOs: 2, 4, 6 or 28. In additional examples, the V_{H} amino acid sequence includes the amino acid sequence set forth as one of SEQ ID NOs: 1, 3, 5, 6, 7, 8, 9 or 27, or any one of 760-1459. In other examples, the V_{L} amino acid sequence includes the amino acid sequence set forth as SEQ ID NOs: 2, 4, 6 or 28. In further examples, the V_{H} nucleic acid sequence is SEQ ID NOs: 29, 31 or 33. In other examples, the V_{L} nucleic acid sequence is SEQ ID NOs: 30, 32 or 34.

[0324] If the V_{H} and the V_{L} are expressed non-contiguously, the chains of the Fv antibody are typically held together by noncovalent interactions. However, these chains tend to dissociate upon dilution, so methods have been developed to crosslink the chains through glutaraldehyde, intermolecular disulfides, or a peptide linker. Thus, in one example, the Fv can be a disulfide stabilized Fv (dsFv), wherein the heavy chain variable region and the light chain variable region are chemically linked by disulfide bonds.

[0325] In an additional example, the Fv fragments comprise V_{H} and V_{L} chains connected by a peptide linker These single-chain antigen binding proteins (scFv) are prepared by constructing a structural gene comprising DNA sequences encoding the V_{H} and V_{L} domains connected by an oligonucleotide. The structural gene is inserted into an expression vector, which is subsequently introduced into a host cell such as E. coli. The recombinant host cells synthesize a single polypeptide chain with a linker peptide bridging the two V domains. Methods for producing scFvs are known in the art (see Whitlow et al., Methods: a Companion to Methods in Enzymology, Vol. 2, page 97, 1991; Bird et al., Science 242:423, 1988; U.S. Pat. No. 4,946,778; Pack et al., Bio/Technology 11:1271, 1993; and Sandhu, supra). Dimers of a single chain antibody (scFV₂), are also contemplated.

[0326] Antibody fragments can be prepared by proteolytic hydrolysis of the antibody or by expression in E. coli of DNA encoding the fragment. Antibody fragments can be obtained by pepsin or papain digestion of whole antibodies by conventional methods. For example, antibody fragments can be produced by enzymatic cleavage of antibodies with pepsin to provide a 5S fragment denoted F(ab′)₂. This fragment can be further cleaved using a thiol reducing agent, and optionally a blocking group for the sulfhydryl groups resulting from cleavage of disulfide linkages, to produce 3.5S Fab′ monovalent fragments. Alternatively, an enzymatic cleavage using pepsin produces two monovalent Fab′ fragments and an Fc fragment directly (see U.S. Pat. No. 4,036,945 and U.S. Pat. No. 4,331,647, and references contained therein; Nisonhoff et al., Arch. Biochem. Biophys. 89:230, 1960; Porter, Biochem. J. 73:119, 1959; Edelman et al., Methods in Enzymology, Vol. 1, page 422, Academic Press, 1967; and Coligan et al. at sections 2.8.1-2.8.10 and 2.10.1-2.10.4).

[0327] Other methods of cleaving antibodies, such as separation of heavy chains to form monovalent light-heavy chain fragments, further cleavage of fragments, or other enzymatic, chemical, or genetic techniques may also be used, so long as the fragments bind to the antigen that is recognized by the intact antibody.

[0328] One of skill will realize that conservative variants of the antibodies can be produced. Such conservative variants employed in antibody fragments, such as dsFv fragments or in scFv fragments, will retain critical amino acid residues necessary for correct folding and stabilizing between the V_{H} and the V_{L} regions, and will retain the charge characteristics of the residues in order to preserve the low pI and low toxicity of the molecules. Amino acid substitutions (such as at most one, at most two, at most three, at most four, or at most five amino acid substitutions) can be made in the V_{H} and the V_{L} regions to increase yield. In particular examples, the V_{H} sequence is SEQ ID NOs: 1, 3, 5, 6, 7, 8, 9, 27 or any one of SEQ ID NOs: 760-1459. In other examples, the V_{L} sequence is SEQ ID NOs: 2, 4, 6 or 28. Conservative amino acid substitution tables providing functionally similar amino acids are well known to one of ordinary skill in the art. The following six groups are examples of amino acids that are considered to be conservative substitutions for one another:
[0329] 1) Alanine (A), Serine (S), Threonine (T);
[0330] 2) Aspartic acid (D), Glutamic acid (E);
[0331] 3) Asparagine (N), Glutamine (Q);
[0332] 4) Arginine (R), Lysine (K);
[0333] 5) Isoleucine (I), Leucine (L), Methionine (M), Valine (V); and
[0334] 6) Phenylalanine (F), Tyrosine (Y), Tryptophan (W).

[0335] The antibodies disclosed herein can be isolated using cloaked antigens, as described in PCT Publication No. WO 2009/100376. Briefly, antigens are cloaked to target antigenicity of the antigen to a specific epitope that specifically bound by the antibody of interest, such as a neutralizing antibody.

[0336] In some embodiments, the isolated antigens used for antibody isolation include a target epitope defined by atomic coordinates of those amino acids of the antigen that contact an antibody of interest that specifically binds the antigen. The gp120 and pg41 antigens have been modified to substitute the surface exposed amino acids located exterior to the target epitope of gp41 or gp120 to focus the antigenicity of the antigen to the target epitope. For example, the method can remove non-target epitopes that might interfere with specific binding of an antibody to the target epitope on gp120 or gp41. In some examples, the amino acid substitutions result in the antigen not being bound by antibodies in a polyclonal serum that specifically bind surface exposed amino acid residues of the wild-type antigen located exterior of the target epitope. In some embodiments, the amino acid substitutions alter antigenicity of the antigen in vivo as compared to the wild-type antigen (unsubstituted antigen) but do not introduce additional glycosylation sites as compared to the wild-type antigen. In some embodiments, that antigen is glycosylated. In some embodiments the cloaked antigen is modified to substitute one or more residues recognized by the antibody of interest to abolish antigen recognition. In some examples, a biotinylation peptide (for example SEQ ID NO: 26) can be fused to the cloaked antigen. Biotinylated cloaked antigen can then be used to stain and thus identify cells, such as PBMC, expressing an antibody of interest.

[0337] Additional recombinant human neutralizing antibodies that specifically bind the same epitope of gp120 bound by the antibodies disclosed herein that specifically bind gp120 (for example, the epitope of gp120 specifically bound by Vc2a11 (VRC01) and Vc2a34 (VRC02), or the specific epitope bound by VRC03, see the examples section below), or human neutralizing antibodies that specifically the same epitope of gp41 bound by antibodies that specifically bind gp41 (for example, the epitope bound by L_{100A}W, F_{100B}W, V_{100D}W, and L_{100A}W-V_{100D}W variants of antibody 2F5, see the Examples section below), can be isolated by screening of a recombinant combinatorial antibody library, such as a Fab phage display library (see, for example, U.S. Patent Application Publication No. 2005/0123900). In some cases the phage display libraries are prepared using cDNAs of the variable regions of heavy and light chains prepared from mRNA derived from human lymphocytes. Methodologies for preparing and screening such libraries are known in the art. There are commercially available kits for generating phage display libraries (for example, the Pharmacia Recombinant Phage Antibody System, Catalog No. 27-9400-01; and the Stratagene SurfZAP™ phage display kit, catalog no. 240612). There are also other methods and reagents that can be used in generating and screening antibody display libraries (see, for example, U.S. Pat. No. 5,223,409; PCT Publication No. WO 92/18619; PCT Publication No. WO 91/17271; PCT Publication No. WO 92/20791; PCT Publication No. WO 92/15679; PCT Publication No. WO 93/01288; PCT Publication No. WO 92/01047; PCT Publication No. WO 92/09690; Fuchs et al., Bio/Technology 9:1370-1372, 1991; Hay et al., Hum. Antibod. Hybridomas 3:81-85, 1992; Huse et al., Science 246:1275-1281, 1989; McCafferty et al., Nature 348:552-554, 1990; Griffiths et al., EMBO J. 12:725-734, 1993)

[0338] In one embodiment, to isolate additional human antibodies that specifically bind either gp120 or gp41, a neutralizing antibody that specifically binds gp120 or gp41, as described herein, is first used to select human heavy and light chain sequences having similar binding activity toward gp120 or gp41, such as using the epitope imprinting methods disclosed in PCT Publication No. WO 93/06213. The antibody libraries used in this method are scFv libraries prepared and screened, using methods such as those as described in PCT Publication No. WO 92/01047, McCafferty et al., Nature 348:552-554, 1990; and/or Griffiths et al., EMBO J. 12:725-734, 1993 using gp120.

[0339] Once initial human variable light chain (V_{L}) and variable heavy chain (V_{H}) segments are selected, “mix and match” experiments, in which different pairs of the initially selected V_{L} and V_{H} segments are screened for gp120 or gp41 binding, such as to the epitopes bound by VRC01, VRC02, and VRC03 (gp120) or to the epitope bound by the L_{100A}W, F_{100B}W, V_{100D}W, and L_{100A}W-V_{100D}W variants of antibody 2F5 (in gp41) are performed to select V_{L}/V_{H} pair combinations of interest. Additionally, to increase binding affinity of the antibody, the V_{L} and V_{H} segments can be randomly mutated, such as within H-CDR3 region or the L-CDR3 region, in a process analogous to the in vivo somatic mutation process responsible for affinity maturation of antibodies during a natural immune response. This in vitro affinity maturation can be accomplished by amplifying V_{H} and V_{L} regions using PCR primers complementary to the H-CDR3 or L-CDR3, respectively. In this process, the primers have been “spiked” with a random mixture of the four nucleotide bases at certain positions such that the resultant PCR products encode V_{H} and V_{L} segments into which random mutations have been introduced into the V_{H} and/or V_{L} CDR3 regions. These randomly mutated V_{H} and V_{L} segments can be tested to determine the binding affinity for gp120 or gp41. In particular examples, the V_{H} amino acid sequence is SEQ ID NOs: 1, 3, 5, 6, 7, 8, 9, 27, or any one of 760-1459. In other examples, the V_{L} amino acid sequence is SEQ ID NOs: 2, 4, 6 or 28.

[0340] Following screening and isolation of an antibody that binds gp120 or gp41 from a recombinant immunoglobulin display library, nucleic acid encoding the selected antibody can be recovered from the display package (for example, from the phage genome) and subcloned into other expression vectors by standard recombinant DNA techniques, as described herein. If desired, the nucleic acid can be further manipulated to create other antibody fragments, also as described herein. To express a recombinant antibody isolated by screening of a combinatorial library, the DNA encoding the antibody is cloned into a recombinant expression vector and introduced into a mammalian host cells, as described herein.

[0341] The antibodies or antibody fragments disclosed herein can be derivatized or linked to another molecule (such as another peptide or protein). In general, the antibody or portion thereof is derivatized such that the binding to gp120 or gp41 is not affected adversely by the derivatization or labeling. For example, the antibody can be functionally linked (by chemical coupling, genetic fusion, noncovalent association or otherwise) to one or more other molecular entities, such as another antibody (for example, a bispecific antibody or a diabody), a detection agent, a pharmaceutical agent, and/or a protein or peptide that can mediate associate of the antibody or antibody portion with another molecule (such as a streptavidin core region or a polyhistidine tag).

[0342] One type of derivatized antibody is produced by cross-linking two or more antibodies (of the same type or of different types, such as to create bispecific antibodies). Suitable crosslinkers include those that are heterobifunctional, having two distinctly reactive groups separated by an appropriate spacer (such as m-maleimidobenzoyl-N-hydroxysuccinimide ester) or homobifunctional (such as disuccinimidyl suberate). Such linkers are available from Pierce Chemical Company (Rockford, Ill.).

[0343] An antibody that specifically binds gp120 or gp41 can be labeled with a detectable moiety. Useful detection agents include fluorescent compounds, including fluorescein, fluorescein isothiocyanate, rhodamine, 5-dimethylamine-1-napthalenesulfonyl chloride, phycoerythrin, lanthanide phosphors and the like. Bioluminescent markers are also of use, such as luciferase, Green fluorescent protein, Yellow fluorescent protein. An antibody can also be labeled with enzymes that are useful for detection, such as horseradish peroxidase, β-galactosidase, luciferase, alkaline phosphatase, glucose oxidase and the like. When an antibody is labeled with a detectable enzyme, it can be detected by adding additional reagents that the enzyme uses to produce a reaction product that can be discerned. For example, when the agent horseradish peroxidase is present the addition of hydrogen peroxide and diaminobenzidine leads to a colored reaction product, which is visually detectable. An antibody may also be labeled with biotin, and detected through indirect measurement of avidin or streptavidin binding. It should be noted that the avidin itself can be labeled with an enzyme or a fluorescent label.

[0344] An antibody may be labeled with a magnetic agent, such as gadolinium. Antibodies can also be labeled with lanthanides (such as europium and dysprosium), and manganese. Paramagnetic particles such as superparamagnetic iron oxide are also of use as labels. An antibody may also be labeled with a predetermined polypeptide epitopes recognized by a secondary reporter (such as leucine zipper pair sequences, binding sites for secondary antibodies, metal binding domains, epitope tags). In some embodiments, labels are attached by spacer arms of various lengths to reduce potential steric hindrance.

[0345] An antibody can also be labeled with a radiolabeled amino acid. The radiolabel may be used for both diagnostic and therapeutic purposes. Examples of labels for polypeptides include, but are not limited to, the following radioisotopes or radionucleotides: ³H, ¹⁴C, ¹⁵N, ³⁵S, ⁹⁰Y, ⁹⁹Tc, ¹¹¹In, ¹²⁵I, ¹³¹I.

[0346] An antibody can also be derivatized with a chemical group such as polyethylene glycol (PEG), a methyl or ethyl group, or a carbohydrate group. These groups may be useful to improve the biological characteristics of the antibody, such as to increase serum half-life or to increase tissue binding.

[0347] Means of detecting such labels are well known to those of skill in the art. Thus, for example, radiolabels may be detected using photographic film or scintillation counters, fluorescent markers may be detected using a photodetector to detect emitted illumination. Enzymatic labels are typically detected by providing the enzyme with a substrate and detecting the reaction product produced by the action of the enzyme on the substrate, and colorimetric labels are detected by simply visualizing the colored label.

[0348] B. Polynucleotides and Expression

[0349] Nucleic acid molecules (also referred to as polynucleotides) encoding the polypeptides provided herein (including, but not limited to antibodies) can readily be produced by one of skill in the art. For example, these nucleic acids can be produced using the amino acid sequences provided herein (such as the CDR sequences, heavy chain and light chain sequences), sequences available in the art (such as framework sequences), and the genetic code. The nucleic acids encoding the VRC01 heavy chain was deposited as ATCC Deposit Number PTA-10412; the nucleic acids encoding the VRC01 light chain was deposited as ATCC Deposit Number PTA-10411; the nucleic acids encoding the VRC02 heavy chain was deposited as ATCC Deposit Number PTA-10414; and the nucleic acidd encoding the VRC02 light chain was deposited as ATCC Deposit Number PTA-10413. Nucleic acids encoding the VRC03 heavy chain and VRC03 light chain were deposited at the ATCC on Dec. 23, 2009 as ATCC Deposit Numbers PTA-10551 and PTA-10550, respectively. All deposits were made in accordance with the Budapest Treaty.

[0350] V_{H} nucleic acid sequences are set forth as SEQ ID NOs: 29, 31, 33, and any one of 61-759 and include degenerate variants thereof. V_{L} nucleic acid sequences are set forth as SEQ ID NOs: 30, 32 and 34, and include degenerate variants thereof. One of skill in the art can readily use the genetic code to construct a variety offunctionally equivalent nucleic acids, such as nucleic acids which differ in sequence but which encode the same antibody sequence, or encode a conjugate or fusion protein including the V_{L} and/or V_{H} nucleic acid sequence.

[0351] Nucleic acid sequences encoding the antibodies that specifically bind gp120 or gp41 can be prepared by any suitable method including, for example, cloning of appropriate sequences or by direct chemical synthesis by methods such as the phosphotriester method of Narang et al., Meth. Enzymol. 68:90-99, 1979; the phosphodiester method of Brown et al., Meth. Enzymol. 68:109-151, 1979; the diethylphosphoramidite method of Beaucage et al., Tetra. Lett. 22:1859-1862, 1981; the solid phase phosphoramidite triester method described by Beaucage & Caruthers, Tetra. Letts. 22(20):1859-1862, 1981, for example, using an automated synthesizer as described in, for example, Needham-VanDevanter et al., Nucl. Acids Res. 12:6159-6168, 1984; and, the solid support method of U.S. Pat. No. 4,458,066. Chemical synthesis produces a single stranded oligonucleotide. This can be converted into double stranded DNA by hybridization with a complementary sequence or by polymerization with a DNA polymerase using the single strand as a template. One of skill would recognize that while chemical synthesis of DNA is generally limited to sequences of about 100 bases, longer sequences may be obtained by the ligation of shorter sequences.

[0352] Exemplary nucleic acids can be prepared by cloning techniques. Examples of appropriate cloning and sequencing techniques, and instructions sufficient to direct persons of skill through many cloning exercises are found in Sambrook et al., supra, Berger and Kimmel (eds.), supra, and Ausubel, supra. Product information from manufacturers of biological reagents and experimental equipment also provide useful information. Such manufacturers include the SIGMA Chemical Company (Saint Louis, Mo.), R&D Systems (Minneapolis, Minn.), Pharmacia Amersham (Piscataway, N.J.), CLONTECH Laboratories, Inc. (Palo Alto, Calif.), Chem Genes Corp., Aldrich Chemical Company (Milwaukee, Wis.), Glen Research, Inc., GIBCO BRL Life Technologies, Inc. (Gaithersburg, Md.), Fluka Chemica-Biochemika Analytika (Fluka Chemie AG, Buchs, Switzerland), Invitrogen (Carlsbad, Calif.), and Applied Biosystems (Foster City, Calif.), as well as many other commercial sources known to one of skill.

[0353] Nucleic acids can also be prepared by amplification methods. Amplification methods include polymerase chain reaction (PCR), the ligase chain reaction (LCR), the transcription-based amplification system (TAS), the self-sustained sequence replication system (3SR). A wide variety of cloning methods, host cells, and in vitro amplification methodologies are well known to persons of skill.

[0354] Any of the nucleic acids encoding any of the antibodies, V_{H} and/or V_{L}, disclosed herein (or fragment thereof) can be expressed in a recombinantly engineered cell such as bacteria, plant, yeast, insect and mammalian cells. These antibodies can be expressed as individual V_{H} and/or V_{L} chain, or can be expressed as as a fusion protein. An immunoadhesin can also be expressed. Thus, in some examples, nucleic acids encoding a V_{H} and V_{L}, and immunoadhesin are provided. The nucleic acid sequences can optionally encode a leader sequence.

[0355] To create a single chain antibody, (scFv) the V_{H}- and V_{L}-encoding DNA fragments are operatively linked to another fragment encoding a flexible linker, e.g., encoding the amino acid sequence (Gly₄-Ser)₃, such that the V_{H} and V_{L} sequences can be expressed as a contiguous single-chain protein, with the V_{L} and V_{H} domains joined by the flexible linker (see, e.g., Bird et al., Science 242:423-426, 1988; Huston et al., Proc. Natl. Acad. Sci. USA 85:5879-5883, 1988; McCafferty et al., Nature 348:552-554, 1990). Optionally, a cleavage site can be included in a linker, such as a furin cleavage site.

[0356] The nucleic acid encoding the V_{H} and/or the V_{L} optionally can encode an Fc domain (immunoadhesin). The Fc domain can be an IgA, IgM or IgG Fc domain. The Fc domain can be an optimized Fc domain, as described in U.S. Published Patent Application No. 20100/093979, incorporated herein by reference. In one example, the immunoadhesin is an IgG₁ Fc.

[0357] The single chain antibody may be monovalent, if only a single V_{H} and V_{L} are used, bivalent, if two V_{H} and V_{L} are used, or polyvalent, if more than two V_{H} and V_{L} are used. Bispecific or polyvalent antibodies may be generated that bind specifically to gp120 and to another molecule, such as gp41. The encoded V_{H} and V_{L} optionally can include a furin cleavage site between the V_{H} and V_{L} domains.

[0358] It is expected that those of skill in the art are knowledgeable in the numerous expression systems available for expression of proteins including E. coli, other bacterial hosts, yeast, and various higher eukaryotic cells such as the COS, CHO, HeLa and myeloma cell lines.

[0359] The host cell can be a gram positive bacteria including, butare not limited to, Bacillus, Streptococcus, Streptomyces, Staphylococcus, Enterococcus, Lactobacillus, Lactococcus, Clostridium, Geobacillus, and Oceanobacillus. Methods for expressing protein in gram positive bacteria, such as Lactobaccillus are well known in the art, see for example, U.S. Published Patent Application No. 20100/080774. Expression vectors for lactobacillus are described, for example in U.S. Pat. No. 6,100,388, and U.S. Pat. No. 5,728,571. Leader sequences can be included for expression in Lactobacillus. Gram negative bacteria include, but not limited to, E. coli, Pseudomonas, Salmonella, Campylobacter, Helicobacter, Flavobacterium, Fusobacterium, Ilyobacter, Neisseria, and Ureaplasma.

[0360] One or more DNA sequences encoding the antibody or fragment thereof can be expressed in vitro by DNA transfer into a suitable host cell. The cell may be prokaryotic or eukaryotic. The term also includes any progeny of the subject host cell. It is understood that all progeny may not be identical to the parental cell since there may be mutations that occur during replication. Methods of stable transfer, meaning that the foreign DNA is continuously maintained in the host, are known in the art. Hybridomas expressing the antibodies of interest are also encompassed by this disclosure.

[0361] The expression of nucleic acids encoding the isolated proteins described herein can be achieved by operably linking the DNA or cDNA to a promoter (which is either constitutive or inducible), followed by incorporation into an expression cassette. The promoter can be any promoter of interest, including a cytomegalovirus promoter and a human T cell lymphotrophic virus promoter (HTLV)-1. Optionally, an enhancer, such as a cytomegalovirus enhancer, is included in the construct. The cassettes can be suitable for replication and integration in either prokaryotes or eukaryotes. Typical expression cassettes contain specific sequences useful for regulation of the expression of the DNA encoding the protein. For example, the expression cassettes can include appropriate promoters, enhancers, transcription and translation terminators, initiation sequences, a start codon (i.e., ATG) in front of a protein-encoding gene, splicing signal for introns, sequences for the maintenance of the correct reading frame of that gene to permit proper translation of mRNA, and stop codons. The vector can encode a selectable marker, such as a marker encoding drug resistance (for example, ampicillin or tetracycline resistance).

[0362] To obtain high level expression of a cloned gene, it is desirable to construct expression cassettes which contain, at the minimum, a strong promoter to direct transcription, a ribosome binding site for translational initiation (internal ribosmal binding sequences), and a transcription/translation terminator. For E. coli, this includes a promoter such as the T7, trp, lac, or lambda promoters, a ribosome binding site, and preferably a transcription termination signal. For eukaryotic cells, the control sequences can include a promoter and/or an enhancer derived from, for example, an immunoglobulin gene, HTLV, SV40 or cytomegalovirus, and a polyadenylation sequence, and can further include splice donor and/or acceptor sequences (for example, CMV and/or HTLV splice acceptor and donor sequences). The cassettes can be transferred into the chosen host cell by well-known methods such as transformation or electroporation for E. coli and calcium phosphate treatment, electroporation or lipofection for mammalian cells. Cells transformed by the cassettes can be selected by resistance to antibiotics conferred by genes contained in the cassettes, such as the amp, gpt, neo and hyg genes.

[0363] When the host is a eukaryote, such methods of transfection of DNA as calcium phosphate coprecipitates, conventional mechanical procedures such as microinjection, electroporation, insertion of a plasmid encased in liposomes, or virus vectors may be used. Eukaryotic cells can also be cotransformed with polynucleotide sequences encoding the antibody, labeled antibody, or functional fragment thereof, and a second foreign DNA molecule encoding a selectable phenotype, such as the herpes simplex thymidine kinase gene. Another method is to use a eukaryotic viral vector, such as simian virus 40 (SV40) or bovine papilloma virus, to transiently infect or transform eukaryotic cells and express the protein (see for example, Eukaryotic Viral Vectors, Cold Spring Harbor Laboratory, Gluzman ed., 1982). One of skill in the art can readily use an expression systems such as plasmids and vectors of use in producing proteins in cells including higher eukaryotic cells such as the COS, CHO, HeLa and myeloma cell lines.

[0364] Modifications can be made to a nucleic acid encoding a polypeptide described herein without diminishing its biological activity. Some modifications can be made to facilitate the cloning, expression, or incorporation of the targeting molecule into a fusion protein. Such modifications are well known to those of skill in the art and include, for example, termination codons, a methionine added at the amino terminus to provide an initiation, site, additional amino acids placed on either terminus to create conveniently located restriction sites, or additional amino acids (such as poly His) to aid in purification steps. In addition to recombinant methods, the immunoconjugates, effector moieties, and antibodies of the present disclosure can also be constructed in whole or in part using standard peptide synthesis well known in the art.

[0365] Once expressed, the recombinant immunoconjugates, antibodies, and/or effector molecules can be purified according to standard procedures of the art, including ammonium sulfate precipitation, affinity columns, column chromatography, and the like (see, generally, R. Scopes, PROTEIN PURIFICATION, Springer-Verlag, N.Y., 1982). The antibodies, immunoconjugates and effector molecules need not be 100% pure. Once purified, partially or to homogeneity as desired, if to be used therapeutically, the polypeptides should be substantially free of endotoxin.

[0366] Methods for expression of antibodies and/or refolding to an appropriate active form, including single chain antibodies, from bacteria such as E. coli have been described and are well-known and are applicable to the antibodies disclosed herein. See, Buchner et al., Anal. Biochem. 205:263-270, 1992; Pluckthun, Biotechnology 9:545, 1991; Huse et al., Science 246:1275, 1989 and Ward et al., Nature 341:544, 1989.

[0367] Often, functional heterologous proteins from E. coli or other bacteria are isolated from inclusion bodies and require solubilization using strong denaturants, and subsequent refolding. During the solubilization step, as is well known in the art, a reducing agent must be present to separate disulfide bonds. An exemplary buffer with a reducing agent is: 0.1 M Tris pH 8, 6 M guanidine, 2 mM EDTA, 0.3 M DTE (dithioerythritol). Reoxidation of the disulfide bonds can occur in the presence of low molecular weight thiol reagents in reduced and oxidized form, as described in Saxena et al., Biochemistry 9: 5015-5021, 1970, and especially as described by Buchner et al., supra.

[0368] Renaturation is typically accomplished by dilution (for example, 100-fold) of the denatured and reduced protein into refolding buffer. An exemplary buffer is 0.1 M Tris, pH 8.0, 0.5 M L-arginine, 8 mM oxidized glutathione (GSSG), and 2 mM EDTA.

[0369] As a modification to the two chain antibody purification protocol, the heavy and light chain regions are separately solubilized and reduced and then combined in the refolding solution. An exemplary yield is obtained when these two proteins are mixed in a molar ratio such that a 5-fold molar excess of one protein over the other is not exceeded. Excess oxidized glutathione or other oxidizing low molecular weight compounds can be added to the refolding solution after the redox-shuffling is completed.

[0370] In addition to recombinant methods, the antibodies, labeled antibodies and functional fragments thereof that are disclosed herein can also be constructed in whole or in part using standard peptide synthesis. Solid phase synthesis of the polypeptides of less than about 50 amino acids in length can be accomplished by attaching the C-terminal amino acid of the sequence to an insoluble support followed by sequential addition of the remaining amino acids in the sequence. Techniques for solid phase synthesis are described by Barany & Merrifield, The Peptides: Analysis, Synthesis, Biology. Vol. 2: Special Methods in Peptide Synthesis, Part A. pp. 3-284; Merrifield et al., J. Am. Chem. Soc. 85:2149-2156, 1963, and Stewart et al., Solid Phase Peptide Synthesis, 2nd ed., Pierce Chem. Co., Rockford, Ill., 1984. Proteins of greater length may be synthesized by condensation of the amino and carboxyl termini of shorter fragments. Methods of forming peptide bonds by activation of a carboxyl terminal end (such as by the use of the coupling reagent N,N′-dicylohexylcarbodimide) are well known in the art.

[0371] C. Isolation of Additional Antibodies with Enhanced Binding Properties

[0372] Epitope scaffolds have been used to isolate antibodies with particular binding specificity (See PCT Publication No. WO 2008/025015). Briefly, an epitope, such as an epitope of a pathogenic agent (for example, an epitope of an HIV-1 polypeptide) recognized by broadly neutralizing antibodies is placed into an appropriate peptide scaffold that preserves its structure and antigenicity. Such epitope scaffolds can then be used as an immunogen to elicit an epitope-specific antibody response in a subject. In another example, such scaffolds can be used to identify specific serum reactivities against the target epitope of the scaffold. This scaffolding technology is applicable not only to HIV-1, but to any pathogen for which a broadly neutralizing antibody and its respective epitope has been characterized at the atomic-level.

[0373] The design of epitope-protein scaffolds which elicit selected neutralizing antibodies is disclosed in PCT Publication No. WO 2008/025015, which is incorporated herein by reference. In general, the protocols utilize searchable databases containing the three dimensional structure of proteins, epitopes, and epitope-antibody complexes to identify proteins that are capable of structurally accommodating at least one selected epitope on their surface. Protein folding energetic predictions are further utilized to make energetic predictions. The predicted energies may be used to optimize the structure of the epitope-scaffold and filter results on the basis of energy criteria in order to reduce the number of candidate proteins and identify energetically stable epitope-scaffolds.

[0374] In one embodiment, a “superposition” epitope-scaffold can be designed and utilized. Superposition epitope-scaffolds are based upon scaffold proteins having an exposed segment on their surface with a similar conformation as a selected target epitope. The backbone atoms in this superposition region can be structurally superimposed onto the target epitope with less than a selected level of deviation from their native configuration. Candidate scaffolds are identified by computationally searching through a library of three-dimensional structures. The candidate scaffolds are further designed by putting epitope residues in the superposition region of the scaffold protein and making additional mutations on the surrounding surface of the scaffold to prevent undesirable interactions between the scaffold and the epitope or the scaffold and the antibody.

[0375] Superposition is advantageous in that it is a conservative technique. Epitope-scaffolds designed by superposition require only a limited number of mutations on the surface of known, stable proteins. Thus, the designs can be produced rapidly and a high fraction of the first round designs are likely to fold properly.

[0376] In another embodiment, “grafting” epitope scaffolds are utilized. Grafting epitope scaffolds utilize scaffold proteins that can accommodate replacement of an exposed segment with the crystallized conformation of the target epitope. For each suitable scaffold identified by computationally searching through a database of known three-dimensional structures, an exposed segment is replaced by the target epitope. The surrounding protein side chains are further mutated to accommodate and stabilize the inserted epitope. Mutations are further made on the surface of the scaffold to avoid undesirable interactions between the scaffold and epitope or scaffold and antibody. Grafting epitope-scaffolds should substantially mimic the epitope-antibody interaction, as the epitope is presented in substantially its native conformation. As such, grafting may be utilized to treat complex epitopes which are more difficult to incorporate using superposition techniques.

[0377] In certain embodiments, protein and design calculations are performed using the ROSETTA™ computer program to design the eptiope scaffolds. ROSETTA™ is a software application, developed at least in part at the University of Washington which provides protein structure predictions. ROSETTA™ utilizes physical models of the macromolecular interactions and algorithms for finding the lowest energy structure for an amino acid sequence in order to predict the structure of a protein. Furthermore ROSETTA™ may use these models and algorithms to find the lowest energy amino acid sequence for a protein or protein-protein complex for protein design. The ROSETTA™ energy function and several modules of the ROSETTA™ protein structure modeling and design platform are employed in the protein scaffold design discussed below.

[0378] Described herein are methods of increasing an antibody binding affinity and neutralizing capacity that utilize this epitope scaffolding technology. In the methods described herein, an original (parental) antibody that specifically binds a scaffolded epitope is identified and sequenced. The amtibody bining determinants of antibody reactivity are then identified by mutagenesis (for example, amino acid substitutions) of the antibody sequences, wherein variant antibodies are produced. These amino acid substitutions can be made in one or more CDRs and/or in one or more framework regions of the original antibody. The amino acid substitutions can be a replacement of the amino acid in the original antibody for a tryptophan. In some embodiments, the antibodies include at most one, at most two, at most three or at most four amino acids substitutions, such as in the CDRs. These variant antibodies, such as the antibodies including one, two, three or four amino acids substitutions, are then evaluated for binding to the epitope scaffold. Antibodies are selected that have altered binding affinity for the epitope scaffold as compared to the original (parental) antibody.

[0379] In particular examples, selection of residues for mutagenesis is aided by structural modeling of the scaffold-antibody interaction. To produce an antibody with enhanced binding affinity, the amino acid(s) that have been identified as critical for antibody reactivity are then further substituted and the effects on antibody reactivity measured by further probing with the epitope scaffold.

[0380] Any method known to the art can be used to determine antibody-scaffold affinity. In some examples, the epitope scaffold probe is fused to a biotinylation peptide. In particular examples, the biotinylation peptide is SEQ ID NO: 26.

[0381] In some examples, the amino acid residues in the antibody that are responsible for specific binding to the epitope are indicated by a decrease in antibody affinity of the variant antibody as compared to the parental antibody. In some embodiments, antibodies are selected wherein binding is decreased by at least 20%, at least 30% at least 40% at least 50% at least 100% (2-fold), at least 200%, at least 300%, at least 400%, at least 500%, at least 600%, at least 700%, at least 800%, at least 900%, or at least 1,000% (10-fold) as compared to the original antibody. The decrease of affinity for the scaffold identifies the variant antibody as compared to the parental antibody to identify the one or more amino acids as critical for antigen binding. In one example, the complete loss of antibody binding affinity for the epitope scaffold identifies the one or more amino acid residues as critical for specific binding of antibody to the epitope.

[0382] In other embodiments, variant antibodies are selected wherein binding is increased by at least 20%, at least 30% at least 40% at least 50% at least 100% (2-fold), at least 200%, at least 300%, at least 400%, at least 500%, at least 600%, at least 700%, at least 800%, at least 900%, or at least 1,000% (10-fold) as compared to the parental antibody. An increase of the binding of the variant antibody as compared to the parental antibody identifies the one or more amino acid residues as critical for specific binding of the antibody to the epitope.

[0383] An exemplary method is disclosed herein (see the EXAMPLES section), wherein this technology is utilized for an antibody that specifically binds an antigenic glycoprotein of HIV. However, this method is broadly applicable to antibodies that specifically bind any antigen of interest. In some embodiments, the antibody specifically binds a pathogen of interest. Pathogens include viruses, fungi, bacteria, and protozoa. In other example the antibody specifically binds a tumor antigen of anteerest.

[0384] While this disclosure is written with specific reference to the identification of antibodies that are specific for HIV, such as antibodies specific for gp120 and gp140 from HIV, the methods disclosed herein, including those described in the EXAMPLES are equally applicable to the identification of other antigens, for example antigens from pathogenic sources as well as tumor antigens. In some examples, using the epitope scaffolds such as described in PCT Publication No. WO 2008/025015 can be used to identify epitope specific B-cells and isolate specific IgG clones that bind to a target epitope, such as the site of vulnerability ion the surface of gp120, as disclosed herein. With reference to FIG. 117, in some examples, a subject is selected that produces, or has broadly neutralizing sera, such that the B-cells isolated from that subject are believed express one or more broadly neutralizing antibodies to an antigen of interest, such as an antigen from a pathogenic organism or a tumor (see FIG. 117, 1). B-cells are isolated from the subject, for example using the procedures outlined in the EXAMPLES section, and the isolated B-cells are contacted with a target antigen of interest (see FIG. 117, 2), such as a resurfaced antigen, and the complex of the B-cells and the target antigen of interest is isolated (see FIG. 117, 3). Nucleic acids are obtained from the B-cells are analyzed and antibodies encoded by the Ig gene are synthesized (see FIG. 117, 4) and the antibodies are further characterized (see FIG. 117, 5). In some examples, the antibody antigen complexes are further characterized structurally, for example using X-ray diffraction methods (see FIG. 117, 6), which allows the important antibody/antigen contacts to be mapped. This information can be used to define classes of neutralizing antibodies specific for an antigen of interest, for example as is disclosed herein for the class of VRC01 and VRC03-like antibodies. The structural information about the antigen/antibody contacts and conformation can be analyzed in conjunction with sequencing data, such as 454 sequencing data, to identify additional antibodies that have the same or similar binding properties, in that they are highly specific for a specific neutralizing epitope on the surface of the antigen of interest. By combining sequence analysis, such as 454 sequencing with structural characterization of antibody/antigen interactions at the atomic level it is now possible to identify classes of neutralizing antibodies from a subject. As disclosed herein, this has now been demonstrated for HIV using designed gp120 antigens. In other words, the combination of sequencing, such as 454 sequencing with identified binding motifs in antibodies allows the identification of additional antibodies. Importantly, however, it allows for a short-cut (see e.g. steps 1-7 in FIG. 117) as these antibodies are directly identified from B-cells as these antibodies are directly identified from B-cells without the requirement for isolating antigen specific B cells. In doing so, it ties genomics technologies directly to sera characterization. This tie permits direct interrogation of the antibodyome, which is the family of antibodies specific for an antigen or even an organism or cancer, or interest. In some examples, the methods described herein can be used to examine a time course of antibody maturation from seroconversion to production of broadly neutralizing antibodies. In some embodiments, the methods described herein are used to monitor the development of antibodies in vaccines is a subject, for example to allow feedback at the antibody sequence level and subsequent redesign of the vaccines during vaccine development.

[0385] The methods disclosed herein have broad applications for of identifying specific antibodies, classes or species of antibodies with defined specificity, for example as exemplified by the identification of VRC01 and VRC03-like antibodies disclosed herein. This combination of structural and genomic analysis of 1g may provide a generic way of identifying specific antibodies, as well as classes or species of antibodies with defined specificities. Such antibodies, like VRC01 and related antibodies, can potentially be used for prevention strategies, such as microbicides or passive protection of HIV infection, vaccine design, diagnostics, and therapy of infected individuals.

[0386] Thus, viral antigenic epitopes can be used with the methods disclosed herein to identify classes of antibodies specific for the antigen of interest. Antigens of use in the methods disclosed herein include, but are not limited to, antigenic epitopes from dengue virus, human immunodeficiency virus, influenza virus, metapneumovirus, norovirus, papillomavirus, parvovirus, SARS virus, smallpox virus, picornaviruses, respiratory syncitial virus, parainfluenza virus, measles, hepatitis, measles, varicella zoster, rabies and West Nile virus, among many others. In some embodiments, the antigenic epitope is from a virus causes a respiratory disorder (for example, adeno, echo, rhino, coxsackie, influenza, parainfluenza, or respiratory syncytial virus), a digestive disorder (for example, rota, parvo, dane particle, or hepatitis A virus), an epidermal-epithelial disorder (for example, verruca, papilloma, molluscum, rubeola, rubella, small pox, cowpox), a herpes virus disease (for example, varicella-zoster, simplex I, or simplex II virus), an arbovirus disease (for example, dengue, yellow, or hemorrhagic fevers), a viral disease of the central nervous system (for example, polio or rabies), a viral heart disease, or acquired immune deficiency (AIDS). The antigenic epitope can also be from a bacteria. In some examples, bacteria antigenic epitope is a Pyogenic cocci antigen from an organism that causes, for example, staphylococcal, streptococcal, pneumococcal, meningococcal, and gonococcal infections; a gram-negative rod antigen from an organism that causes, for example, E. coli, Klebsiella, enterobacter, pseudomonas, or legionella infections; an antigenic epitope for an organism that causes, for example, hemophilus influenza, bordetella pertussis, or diphtheria infections. Also encompassed in this disclosure are bacterial antigens from enteropathic bacteria (for example, S. typhi), clostridia (for example, C. tetani or C. botulinum)), and mycobacteria (for example, M. tuberculosis or M. leprae). Exemplary antigens are the CFP10 polypeptide or a domain of other polypeptides of Mycobacterium tuberculosis, or of a domain of the pilus polypeptide of Vibrio cholera, the CjaA polypeptide of Campylobacter coli, the Sfb 1 polypeptide of Streptococcus pyogenes, the UreB polypeptide Helicobacter pylori, or of other pathogenic organisms such as the circumsporozoite polypeptide of Plasmodium falciparum. Non-limiting examples of bacterial (including mycobacterial) epitopes can be found, for example, in Mei et al., Mol. Microbiol. 26:399-407, 1997; and U.S. Pat. No. 6,790,950 (gram negative bacteria); U.S. Pat. No. 6,790,448 (gram positive bacteria); U.S. Pat. Nos. 6,776,993 and 6,384,018 (Mycobacterium tuberculosis).

[0387] In additional examples, the antigenic epitope is from a Chlamydia that causes ornithosis (C. psittaci), chlamydial urethritis and cervicitis (C. trachomatis), inclusion conjunctivitis (C. trachomatis), trachoma (C. trachomatis), or lymphogranuloma venereum (C. trachomatis)). In additional examples, the antigen epitope is from rickettsia that causes typhus fever (R. prowazekii), Rocky Mountain spotted fever (R. rickettsi), scrub fever (R. tsutsugamushi), or Q fever (Coxiella burnetii).

[0388] In particular embodiments, the antigenic epitope is from a fungus, such as Candidae (for example, C. albicans) or Aspergillis (for example, A. fumigatus). In other embodiments, the protozoan antigen is from, for example, Giardia Lamblia, Trichomoniasis, Pneumocystosis, Plasmodium, Leishmania, or Toxoplasma. In further embodiments, the helminth antigen is from, for example, Trichuris, Necator americanus (hookworm disease), Ancylostoma duodenale (hookworm disease), Trichinella spiralis, or S. mansoni.

[0389] In additional embodiments, the method is applied to identify antibodies that bind antigenic epitopes of tumor antigens. Tumor antigens include, but are not limited to carcinoembryonic antigen (“CEA:” e.g., GENBANK® Accession No. AAA62835), ras proteins (see, e.g., Parada et al. Nature 297:474-478, 1982), p53 protein (e.g., GENBANK® Accession No. P07193), prostate-specific antigen (“PSA:” e.g., GENBANK® Accession Nos. NP001639, NP665863), Mucl (e.g., GENBANK® Accession No. P15941), tyrosinase (see, e.g., Kwon et al., Proc Natl Acad Sci USA 84:7473-7477, 1987, erratum Proc Natl Acad Sci USA 85:6352, 1988 Melanoma-associated antigen (MAGES: for examples, see, U.S. Pat. Nos. 5,462,871; 5,554,724; 5,554,506; 5,541,104 and 5,559,558,995). The tumor antigen can be from a tumor of any organ or tissue, including but not limited to solid organ tumors. For example, the tumor can be melanoma, colon-, breast-, lung, cervical-, ovarian, endometrial-, prostate-, skin-, brain-, liver-, kidney, thyroid, pancreatic, esophageal-, or gastric cancer, leukemias, lymphomas, multiple myeloma, myelodysplastic syndrome, premalignant human papiloma virus (HPV)-related lesions, intestinal polyps and other chronic states associated with increased tumor risk.

[0390] D. Compositions and Therapeutic Methods

[0391] Methods are disclosed herein for the prevention or treatment of an HIV infection, such as an HIV-1 infection. Preention can include inhibition of infection with HIV-1. The methods include contacting a cell with an effective amount of the human monoclonal antibodies disclosed herein that specifically binds gp120 or gp41, or a functional fragment thereof. The method can also include administering to a subject a therapeutically effective amount of the human monoclonal antibodies to a subject.

[0392] Methods to assay for neutralization activity include, but are not limited to, a single-cycle infection assay as described in Martin et al. (2003) Nature Biotechnology 21:71-76. In this assay, the level of viral activity is measured via a selectable marker whose activity is reflective of the amount of viable virus in the sample, and the IC50 is determined. In other assays, acute infection can be monitored in the PM1 cell line or in primary cells (normal PBMC). In this assay, the level of viral activity can be monitored by determining the p24 concentrations using ELISA. See, for example, Martin et al. (2003) Nature Biotechnology 21:71-76.

[0393] HIV infection does not need to be completely eliminated for the composition to be effective. For example, a composition can decrease HIV infection by a desired amount, for example by at least 10%, at least 20%, at least 50%, at least 60%, at least 70%, at least 80%, at least 90%, at least 95%, at least 98%, or even at least 100% (elimination of detectable HIV infected cells), as compared to HIV infection in the absence of the composition. In example, the cell is also contacted with an effective amount of an additional agent, such as anti-viral agent. The cell can be in vivo or in vitro. The methods can include administration of one on more additional agents known in the art. In additional examples, HIV replication can be reduced or inhibited by similar methods. HIV replication does not need to be completely eliminated for the composition to be effective. For example, a composition can decrease HIV replication by a desired amount, for example by at least 10%, at least 20%, at least 50%, at least 60%, at least 70%, at least 80%, at least 90%, at least 95%, at least 98%, or even at least 100% (elimination of detectable HIV), as compared to HIV replication in the absence of the composition. In one example, the cell is also contacted with an effective amount of an additional agent, such as anti-viral agent. The cell can be in vivo or in vitro.

[0394] Compositions are provided that include one or more of the antibodies that specifically bind gp120 or gp41, or functional fragments thereof, that are disclosed herein in a carrier. The compositions can be prepared in unit dosage forms for administration to a subject. The amount and timing of administration are at the discretion of the treating physician to achieve the desired purposes. The antibody can be formulated for systemic or local administration. In one example, the antibody that specifically binds gp120 or gp41 is formulated for parenteral administration, such as intravenous administration.

[0395] The compositions for administration can include a solution of the antibody that specifically binds gp120 or the antibody that specifically binds gp41 dissolved in a pharmaceutically acceptable carrier, such as an aqueous carrier. A variety of aqueous carriers can be used, for example, buffered saline and the like. These solutions are sterile and generally free of undesirable matter. These compositions may be sterilized by conventional, well known sterilization techniques. The compositions may contain pharmaceutically acceptable auxiliary substances as required to approximate physiological conditions such as pH adjusting and buffering agents, toxicity adjusting agents and the like, for example, sodium acetate, sodium chloride, potassium chloride, calcium chloride, sodium lactate and the like. The concentration of antibody in these formulations can vary widely, and will be selected primarily based on fluid volumes, viscosities, body weight and the like in accordance with the particular mode of administration selected and the subject's needs.

[0396] A typical pharmaceutical composition for intravenous administration includes about 0.1 to 10 mg of antibody per subject per day. Dosages from 0.1 up to about 100 mg per subject per day may be used, particularly if the agent is administered to a secluded site and not into the circulatory or lymph system, such as into a body cavity or into a lumen of an organ. Actual methods for preparing administrable compositions will be known or apparent to those skilled in the art and are described in more detail in such publications as Remington's Pharmaceutical Science, 19th ed., Mack Publishing Company, Easton, Pa. (1995).

[0397] Antibodies may be provided in lyophilized form and rehydrated with sterile water before administration, although they are also provided in sterile solutions of known concentration. The antibody solution is then added to an infusion bag containing 0.9% sodium chloride, USP, and typically administered at a dosage of from 0.5 to 15 mg/kg of body weight. Considerable experience is available in the art in the administration of antibody drugs, which have been marketed in the U.S. since the approval of RITUXAN® in 1997. Antibodies can be administered by slow infusion, rather than in an intravenous push or bolus. In one example, a higher loading dose is administered, with subsequent, maintenance doses being administered at a lower level. For example, an initial loading dose of 4 mg/kg may be infused over a period of some 90 minutes, followed by weekly maintenance doses for 4-8 weeks of 2 mg/kg infused over a 30 minute period if the previous dose was well tolerated.

[0398] A therapeutically effective amount of a human gp120-specific antibody or human gp41-specific antibody will depend upon the severity of the disease and/or infection and the general state of the patient's health. A therapeutically effective amount of the antibody is that which provides either subjective relief of a symptom(s) or an objectively identifiable improvement as noted by the clinician or other qualified observer. These compositions can be administered in conjunction with another therapeutic agent, either simultaneously or sequentially.

[0399] In one embodiment, administration of the antibody results in a reduction in the establishment of HIV infection and/or reducing subsequent HIV disease progression in a subject. A reduction in the establishment of HIV infection and/or a reduction in subsequent HIV disease progression encompass any statistically significant reduction in HIV activity. In some embodiments, methods are disclosed for treating a subject with an HIV-1 infection. These methods include administering to the subject a therapeutically effective amount of an antibody, or a nucleic acid encoding the antibody, thereby preventing or treating the HIV-1 infection.

[0400] Studies have shown that the rate of HIV transmission from mother to infant is reduced significantly when zidovudine is administered to HIV-infected women during pregnancy and delivery and to the offspring after birth (Connor et al., 1994 Pediatr Infect Dis J 14: 536-541). Several studies of mother-to-infant transmission of HIV have demonstrated a correlation between the maternal virus load at delivery and risk of HIV transmission to the child. The present disclosure provides isolated human monoclonal antibodies that are of use in decreasing HIV-transmission from mother to infant. Thus, in some examples a therapeutically effective amount of a human gp120-specific antibody or human gp41-specific antibody is administered in order to prevent transmission of HIV, or decrease the risk of transmission of HIV, from a mother to an infant. In some examples, a therapeutically effective amount of the antibody is administered to mother and/or to the child at childbirth. In other examples, a therapeutically effective amount of the antibody is administered to the mother and/or infant prior to breast feeding in order to prevent viral transmission to the infant or decrease the risk of viral transmission to the infant. In some embodiments, both a therapeutically effective amount of the antibody and a therapeutically effective amount of another agent, such as zidovudine, is administered to the mother and/or infant.

[0401] For any application, the antibody can be combined with anti-retroviral therapy. Antiretroviral drugs are broadly classified by the phase of the retrovirus life-cycle that the drug inhibits. The disclosed antibodies can be administered in conjunction with Nucleoside and nucleotide reverse transcriptase inhibitors (nRTI), Non-nucleoside reverse transcriptase inhibitors (NNRTI), Protease inhibitors, Entry inhibitors (or fusion inhibitors), Maturation inhibitors, or a Broad spectrum inhibitors, such as natural antivirals. Exemplary agents include lopinavir, ritonavir, zidovudine, lamivudine, tenofovir, emtricitabine and efavirenz.

[0402] Single or multiple administrations of the compositions including the antibodies disclosed herein are administered depending on the dosage and frequency as required and tolerated by the patient. In any event, the composition should provide a sufficient quantity of at least one of the antibodies disclosed herein to effectively treat the patient. The dosage can be administered once but may be applied periodically until either a therapeutic result is achieved or until side effects warrant discontinuation of therapy. In one example, a dose of the antibody is infused for thirty minutes every other day. In this example, about one to about ten doses can be administered, such as three or six doses can be administered every other day. In a further example, a continuous infusion is administered for about five to about ten days. The subject can be treated at regular intervals, such as monthly, until a desired therapeutic result is achieved. Generally, the dose is sufficient to treat or ameliorate symptoms or signs of disease without producing unacceptable toxicity to the patient.

[0403] Controlled-release parenteral formulations can be made as implants, oily injections, or as particulate systems. For a broad overview of protein delivery systems see, Banga, A. J., Therapeutic Peptides and Proteins: Formulation, Processing, and Delivery Systems, Technomic Publishing Company, Inc., Lancaster, Pa., (1995). Particulate systems include microspheres, microparticles, microcapsules, nanocapsules, nanospheres, and nanoparticles. Microcapsules contain the therapeutic protein, such as a cytotoxin or a drug, as a central core. In microspheres the therapeutic is dispersed throughout the particle. Particles, microspheres, and microcapsules smaller than about 1 μm are generally referred to as nanoparticles, nanospheres, and nanocapsules, respectively. Capillaries have a diameter of approximately 5 μm so that only nanoparticles are administered intravenously. Microparticles are typically around 100 μm in diameter and are administered subcutaneously or intramuscularly. See, for example, Kreuter, J., Colloidal Drug Delivery Systems, J. Kreuter, ed., Marcel Dekker, Inc., New York, N.Y., pp. 219-342 (1994); and Tice & Tabibi, Treatise on Controlled Drug Delivery, A. Kydonieus, ed., Marcel Dekker, Inc. New York, N.Y., pp. 315-339, (1992).

[0404] Polymers can be used for ion-controlled release of the antibody compositions disclosed herein. Various degradable and nondegradable polymeric matrices for use in controlled drug delivery are known in the art (Langer, Accounts Chem. Res. 26:537-542, 1993). For example, the block copolymer, polaxamer 407, exists as a viscous yet mobile liquid at low temperatures but forms a semisolid gel at body temperature. It has been shown to be an effective vehicle for formulation and sustained delivery of recombinant interleukin-2 and urease (Johnston et al., Pharm. Res. 9:425-434, 1992; and Pec et al., J. Parent. Sci. Tech. 44(2):58-65, 1990). Alternatively, hydroxyapatite has been used as a microcarrier for controlled release of proteins (Ijntema et al., Int. J. Pharm. 112:215-224, 1994). In yet another aspect, liposomes are used for controlled release as well as drug targeting of the lipid-capsulated drug (Betageri et al., Liposome Drug Delivery Systems, Technomic Publishing Co., Inc., Lancaster, Pa. (1993)). Numerous additional systems for controlled delivery of therapeutic proteins are known (see U.S. Pat. No. 5,055,303; U.S. Pat. No. 5,188,837; U.S. Pat. No. 4,235,871; U.S. Pat. No. 4,501,728; U.S. Pat. No. 4,837,028; U.S. Pat. No. 4,957,735; U.S. Pat. No. 5,019,369; U.S. Pat. No. 5,055,303; U.S. Pat. No. 5,514,670; U.S. Pat. No. 5,413,797; U.S. Pat. No. 5,268,164; U.S. Pat. No. 5,004,697; U.S. Pat. No. 4,902,505; U.S. Pat. No. 5,506,206; U.S. Pat. No. 5,271,961; U.S. Pat. No. 5,254,342 and U.S. Pat. No. 5,534,496).

[0405] E. Diagnostic Methods and Kits

[0406] A method is provided herein for the detection of the expression of gp120 or gp41 in vitro or in vivo. In one example, expression of gp120 or gp41 is detected in a biological sample, and can be used to detect HIV-1 infection. The sample can be any sample, including, but not limited to, tissue from biopsies, autopsies and pathology specimens. Biological samples also include sections of tissues, for example, frozen sections taken for histological purposes. Biological samples further include body fluids, such as blood, serum, plasma, sputum, spinal fluid or urine.

[0407] In several embodiments, a method is provided for detecting AIDS and/or an HIV-1 infection in a subject. The disclosure provides a method for detecting HIV-1 in a biological sample, wherein the method includes contacting a biological sample with the antibody under conditions conducive to the formation of an immune complex, and detecting the immune complex, to detect the gp120 or gp41 in the biological sample. In one example, the detection of gp120 or gp41 in the sample indicates that the subject has an HIV infection. In another example, the detection of gp120 or gp41 in the sample indicates that the subject has AIDS. In another example, detection of gp120 or gp41 in the sample confirms a diagnosis of AIDS and/or an HIV-1 infection in a subject.

[0408] In some embodiments, the disclosed antibodies are used to test vaccines. For example to test if a vaccine composition assumes the same conformation as a gp120 or gp41 peptide. Thus provided herein is a method for detecting testing a vaccine, wherein the method includes contacting a sample containing the vaccine, such as a gp120 or gp41 immunogen, with the antibody under conditions conducive to the formation of an immune complex, and detecting the immune complex, to detect the vaccine g in the sample. In one example, the detection of the immune complex in the sample indicates that vaccine component, such as such as a gp120 or gp41 immunogen assumes a conformation capable of binding the antibody.

[0409] In one embodiment, the antibody is directly labeled with a detectable label. In another embodiment, the antibody that binds gp120 or gp41 (the first antibody) is unlabeled and a second antibody or other molecule that can bind the antibody that binds gp120 or gp41 is utilized. As is well known to one of skill in the art, a second antibody is chosen that is able to specifically bind the specific species and class of the first antibody. For example, if the first antibody is a human IgG, then the secondary antibody may be an anti-human-IgG. Other molecules that can bind to antibodies include, without limitation, Protein A and Protein G, both of which are available commercially.

[0410] Suitable labels for the antibody or secondary antibody are described above, and include various enzymes, prosthetic groups, fluorescent materials, luminescent materials, magnetic agents and radioactive materials. Non-limiting examples of suitable enzymes include horseradish peroxidase, alkaline phosphatase, beta-galactosidase, or acetylcholinesterase. Non-limiting examples of suitable prosthetic group complexes include streptavidin/biotin and avidin/biotin. Non-limiting examples of suitable fluorescent materials include umbelliferone, fluorescein, fluorescein isothiocyanate, rhodamine, dichlorotriazinylamine fluorescein, dansyl chloride or phycoerythrin. A non-limiting exemplary luminescent material is luminol; a non-limiting exemplary a magnetic agent is gadolinium, and non-limiting exemplary radioactive labels include ¹²⁵I, ¹³¹I, ³⁵S or ³H.

[0411] The immunoassays and method disclosed herein can be used for a number of purposes. Kits for detecting a polypeptide will typically comprise an antibody that binds gp120 or gp41, such as any of the antibodies disclosed herein. In some embodiments, an antibody fragment, such as an Fv fragment or a Fab is included in the kit. In a further embodiment, the antibody is labeled (for example, with a fluorescent, radioactive, or an enzymatic label).

[0412] In one embodiment, a kit includes instructional materials disclosing means of use. The instructional materials may be written, in an electronic form (such as a computer diskette or compact disk) or may be visual (such as video files). The kits may also include additional components to facilitate the particular application for which the kit is designed. Thus, for example, the kit may additionally contain means of detecting a label (such as enzyme substrates for enzymatic labels, filter sets to detect fluorescent labels, appropriate secondary labels such as a secondary antibody, or the like). The kits may additionally include buffers and other reagents routinely used for the practice of a particular method. Such kits and appropriate contents are well known to those of skill in the art.

[0413] In one embodiment, the diagnostic kit comprises an immunoassay. Although the details of the immunoassays may vary with the particular format employed, the method of detecting gp120 or gp41 in a biological sample generally includes the steps of contacting the biological sample with an antibody which specifically reacts, under immunologically reactive conditions, to gp120 or gp41. The antibody is allowed to specifically bind under immunologically reactive conditions to form an immune complex, and the presence of the immune complex (bound antibody) is detected directly or indirectly.

[0414] F. Deposits

[0415] Plasmids including the nucleic acids encoding VRC01 heavy chain, VRC01 light chain, VRC02 heavy chain, VRC02 light chain were deposited in accordance with the Budapest Treaty at the American Type Culture Collection (ATCC) on Oct. 14, 2009. VRC01 heavy chain was deposited as ATCC Deposit Number PTA-10412, VRC01 light chain was deposited as ATCC Deposit Number PTA-10411, VRC02 heavy chain was deposited as ATCC Deposit Number PTA-10414, and VRC02 light chain was deposited as ATCC Deposit Number PTA-10413. Plasmids including nucleic acid sequences encoding the VRC03 heavy chain and VRC03 light chain were deposited in accordance with the Budapest Treaty at the ATCC on Dec. 23, 2009. VRC03 heavy chain was deposited as ATCC Deposit Number PTA-10551, VRC03 light chain was deposited as ATCC Deposit Number PTA-10550.

[0416] The following examples are provided to illustrate certain particular features and/or embodiments. These examples should not be construed to limit the disclosure to the particular features or embodiments described.

### EXAMPLES

### Example 1

### Identification of Human Monoclonal HIV-1 Gp120 Specific Neutralizing Antibodies

[0417] This example describes the isolation and characterization of the human monoclonal antibodies VRC01, VRC02, and VRC03.

[0418] As disclosed herein, using knowledge of Env structure together with computer-assisted protein recombinant forms of HIV-1 Env were designed that specifically interact with neutralizing antibodies (Nabs) directed to the CD4 binding site (CD4bs) of the HIV gp120 glycoprotein. These Env probes were used to identify and sort individual B cells expressing CD4bs antibodies, enabling the selective isolation of CD4bs-directed monoclonal antibodies (mAbs) with extensive neutralization breadth. To generate a molecule that preserved the antigenic structure of the neutralizing surface of the CD4bs but eliminated other antigenic regions of HIV-1, proteins were designed whose exposed surface residues were substituted with simian immunodeficiency virus (SIV) homologs and other non-HIV-1 residues (FIG. 1A and FIG. 5). These changes were conferred on a core gp120 and a stabilized core gp120, both of which retained the major contact surface for CD4 located on its outer domain. The gp120 core lacked variable regions 1 to 3 and part of the amino and carboxy termini of the full gp120 molecule, and the stabilized core contained crosslinks between different subregions of the core protein. Eight resurfaced proteins were designed and expressed, together with CD4bs mutants that served as negative controls by eliminating binding to the neutralizing mAb b12. Three resurfaced core Envs retained strong reactivity with b12 and mAb 2G12 (FIG. 6), the latter of which recognizes a surface glycan epitope and served as a positive control for a conformationally intact protein. The resurfaced stabilized core 3 (RSC3) was chosen as the preferred candidate for further studies, because a greater percentage of its surface other than the outer domain CD4bs area was altered compared with the other variants (FIG. 6). The conformational integrity and specificity of the RSC3 protein was confirmed by using a panel of known mAbs (FIG. 14, Table S1). As expected, RSC3 displayed strong reactivity to mAb b12 and little or no reactivity to a CD4 fusion protein (FIGS. 1B and 1C). RSC3 also reacted with two weakly neutralizing CD4bs mAbs, b13 and m18, but it displayed no reactivity to four CD4bs mAbs that do not neutralize primary HIV-1 isolates, nor with mAbs directed to other regions of the HIV-1 Env, including the coreceptor-binding region of gp120 and the V3 and CS regions of gp120 (FIG. 14, Table S1). DRSC3, which lacked a single amino acid at position 371 that eliminated b12 binding, served as a negative control. Together, these data confirmed the integrity of the antibody binding surface of this resurfaced protein, and it was used for analyses of sera and to identify B cells from an HIV-1—infected individual whose sera contained broadly reactive NAbs.

[0419] A panel of broadly neutralizing sera was screened for the presence of antibodies that could preferentially bind to RSC3 compared with DRSC3. CD4bs antibodies were detected in several sera, including serum from donor 45, which had been shown to contain NAbs directed to the CD4bs of gp120 (FIG. 7). To determine whether antibodies that bind to RSC3 were responsible for the broad neutralization mediated by serum 45, neutralization studies were performed by using RSC3 to compete cognate antibodies. The utility of this assay was confirmed with the CD4bs mAb b12 and with mAb F105, which binds differently to the CD4bs and does not bind RSC3 (FIG. 14, Table S1). mAb b12 neutralizes many primary HIV-1 strains, whereas F105 neutralizes mainly laboratory-adapted or other highly sensitive virus strains, such as the HXB2 strain. The addition of RSC3 but not DRSC3 inhibited b12-mediated neutralization of HXB2. RSC3 had no effect on F105 neutralization, and neither RSC3 nor DRSC3 affected neutralization by the anti-V3 mAb 447-52D (FIG. 1D). To interrogate serum 45 neutralization, RSC3 competition studies were performed with this serum against a panel of diverseHIV-1 strains (FIG. 1E). This analysis suggested that serum 45 neutralization was principally directed against the CD4bs on functional viral spikes and that the RSC3 faithfully mimicked this structure.

[0420] To isolate CD4bs-directed mAbs, a method of antigen-specific memory B cell sorting was used together with single cell polymerase chain reaction (PCR), to amplify immunoglobulin G (IgG) heavy- and light-chain genes from the cDNA of individual B cells. RSC3 and DRSC3 were expressed with a tagged amino acid sequence that allows biotin labeling. The two proteins could thus be distinguished by fluorescence-activated cell sorting (FACS) analysis after labeling with streptavidin (SA) conjugated to the fluorochromes allophycocyanin (SA-APC) or phycoerythrin (SA-PE), respectively. Peripheral blood mononuclear cells (PBMC) from donor 45 were incubated with RSC3 SA-APC and DRSC3 SA-PE, and single antigen-specific memory B cells were sorted into wells of a microtiter plate after selecting for memory B cells (CD19+, CD20+, and IgG⁺) that bound to the RSC3 but not the ΔRSC3 probe (FIG. 2A). Out of about 25 million PBMC, 29 single RSC3-specific memory B cells were sorted, and the matching heavy- and light-chain genes were successfully amplified from 12 cells. After cloning into IgG1 expression vectors that reconstituted the heavy and light-chain constant regions, the full IgG mAbs were expressed. Three antibodies (VRC01, VRC02, and VRC03) bound strongly to RSC3 and weakly or not at all to DRSC3 (FIG. 2B, left, FIG. 2C, and FIGS. 8 and 9). To confirm the specificity of these antibodies for the CD4bs, enzyme linked immunosorbent assay (ELISA) was used to test the binding of each mAb against a wild-type gp120 and the CD4bs-defective Asp368→Arg368 (D368R) mutant (FIG. 2B, right). VRC01 and VRC02 bound with ≧100-fold lower relative affinity to the heavy chain variable gene (VH) D368R mutant compared with wild-type gp120, and VRC03 showed no detectable binding to the CD4bs knockout mutant. The ELISA binding profile to an extended panel of mutant Env proteins further confirmed the CD4bs specificity of VRC01, VRC02, and VRC03 (FIG. 14, Table 51).

[0421] Analysis of the heavy- and light-chain nucleotide sequences using JoinSolver software (joinsolver.niaid.nih.gov) and the Immunogenetics Information System (IMGT) database (imgt.cines.fr) revealed that VRC01 and VRC02 were somatic variants of the same IgG1 clone. The heavy-chain CDR3 region of both mAbs was composed of the same 14 amino acids (FIG. 10), and both mAbs were highly somatically mutated, with 32% of the heavy chain variable gene (VH) and 17 to 19% of the kappa light chain variable gene (VK) nucleotides divergent from putative germline gene sequences. VRC03 was potentially derived from a different IgG1 clone, but its heavy chain was derived from the same IGHV1-02*02 and IGHJ1*01 alleles as VRC01 and VRC02. VRC03 was also highly somatically mutated, with an unusual seven-amino acid insertion in heavy-chain framework 3 and 30% of VH and 20% of VK nucleotides divergent from putative germline gene sequences. The heavy chain CDR3 of VRC03 contained 16 amino acids. All three mAbs share common sequence motifs in heavy-chain CDR1, CDR2, and CDR3.

[0422] The binding characteristics of the mAbs were further analyzed by surface plasmon resonance (SPR), competition ELISA, and isothermal titration calorimetry (ITC). SPR demonstrated that VRC01 (KD=3.88×10-9M) and VRC02 (KD=1.11×10-8 M) bound gp120 with high affinity whereas VRC03 reacted with about 10-fold lower affinity (KD=7.31×10-8 M). To evaluate the epitope reactivity of these mAbs on gp120, competition ELISAs was performed with a panel of well-characterized mAbs. As expected, binding by all three VRC mAbs was competed by CD4bs mAbs b12 and F105 and by CD4-Ig (FIG. 3A left and FIG. 11A). Unexpectedly, the binding of mAb 17b to its site in the coreceptor binding region of gp120 was markedly enhanced by the addition of VRC01 or VRC02 (FIG. 3A right). This enhancing effect was similar, although not as profound, as the known effect of CD4-Ig. In contrast, mAb b12 inhibited mAb 17b binding (FIG. 3A right), as previously shown. A similar enhancing result was observed for VRC01 in an assay that measures gp120 binding to its CCRS coreceptor (FIG. 11C). Thus, VRC01 and VRC02 act as partial CD4 agonists in their interaction with gp120, whereas VRC03 does not display this effect. Thermodynamic analysis by ITC provided data consistent with the ELISA results and demonstrated a change in enthalpy (-DH) associated with the VRC01-gp120 interaction that was similar to the interaction of CD4-Ig and gp120 (FIG. 3B), further demonstrating that VRC01 binding induced conformational changes in gp120. In contrast to the data for gp120 binding, VRC01 did not enhance viral neutralization by mAb 17b (FIG. 12). These data suggest that VRC01 and VRC02 partially mimic the interaction of CD4 with gp120. This may explain their broad reactivity, because essentially all HIV-1 isolates must engage CD4 for cell entry.

[0423] The potency and breadth of neutralization by VRC01, VRC02, and VRC03, compared with those by b12 and CD4-Ig, were assessed on a comprehensive panel of Env pseudoviruses (FIGS. 4 and 15-24, Table S2a-S2j). These 190 viral strains represented all major circulating HIV-1 genetic subtypes (clades) and included viruses derived from acute and chronic stages of HIV-1 infection. VRC01 neutralized 91% of these viruses with a geometric mean value of 0.33 mg/ml (FIGS. 4 and 15-24, Table S2a-S2j). The data for VRC02 were very similar (FIGS. 15-24, Table S2a-S2j). Of note, these mAbs were derived from an HIV-1 clade B—infected donor yet displayed neutralization activity against all genetic subtypes of HIV-1. VRC03 was less broad than VRC01 and VRC02, neutralizing 57% of the viruses (FIGS. 15-24, Table S2a-S2j). In contrast, b12, also derived from a clade B-infected donor, neutralized 41% of viruses tested. Because VRC01 was derived from a donor whose sera was also broadly neutralizing, the relationship between the neutralization breadth and potency of serum 45 IgG and mAb VRC01 was also assessed. Among 140 viruses tested, there was a significant association (P=0.005; Fisher's exact test) between the number of viruses neutralized by serum 45 IgG and the number neutralized by VRC01 (FIG. 13A). Among the 122 viruses neutralized by both serum IgG and VRC01, there was a strong association (P<0.0001; Deming linear regression) between the neutralization potency of the serum IgG and the potency of VRC01 (FIG. 13B). Therefore, although VRC01 did not account for all serum 45 IgG neutralization, the VRC01-like antibody specificity largely accounts for the extensive breadth and potency of serum 45. These findings demonstrate that a focused B cell response can target a highly conserved region of the HIV-1 Env in humans.

[0424] Other mAbs are able to neutralize HIV-1, but none has a profile of potency and breadth similar to VRC01 and VRC02. Antibody 4E10 requires relatively high concentrations to neutralize primary strains of HIV-1, and it neutralizes only 12% of Env-pseudoviruses at a concentration of less than 1 μg/ml. The well-characterized CD4bs mAb b12 and the more recently described HJ16 are informative with respect to antigen recognition, but each display restricted breadth (˜40% of HIV-1 strains). Recently, two broadly neutralizing somatic variant mAbs, PG16 and PG9, were isolated by high-throughput neutralization screening of B cell supernatants. The PG16 and PG9 neutralized 73% and 79%, respectively, of viruses tested and recognized a glycosylated region of HIV-1 Env that is present on the native viral trimer, but this epitope is not well presented on gp120 or gp140. VRC01 and VRC02 access the CD4bs region of gp120 in a manner that partially mimics the interaction of CD4 with gp120. This observation may explain their impressive breadth of reactivity. The isolation of these mAbs from an HIV-1—infected donor and the demonstration that they neutralize the vast majority of HIV-1 strains by targeting the functionally conserved receptor binding region of Env provides proof of concept that such antibodies can be elicited in humans. The discovery of these mAbs provides new insights into how the human immune system is able to effectively target a vulnerable site on the viral Env.

### Materials and Methods

[0425] Human Specimens.

[0426] The sera and peripheral blood mononuclear cells (PBMC) described in this Example were from HIV-1 infected individuals enrolled in investigational review board approved clinical protocols at the National Institute of Allergy and Infectious Diseases. Donor 45, from whom mAbs VRC01, VRC02 and VRC03 were isolated, has been HIV-1 infected with a clade B virus for more than 15 years. He is a slow progressor with CD4 T-cell counts over 500 cells/μl, plasma HIV-1 RNA values less than 15,000 copies/ml. He has not initiated antiretroviral treatment.

[0427] Computational Design of the Antigenically Resurfaced Core (RC) and Resurfaced Stabilized Core (RSC) Proteins.

[0428] The atomic level structures of HIV-1 gp120 in complex with CD4 (Protein Data Bank (PDB) ID: 2NXY), b12 (PDB ID: 2NY7), and F105 (PDB ID: 3HI1) defined the CD4-binding footprint, and neutralizing (b12) as well as non-neutralizing (F105) antibody epitopes on gp120. These structures were used to guide the computational design of new gp120 proteins that maintain the b12 neutralizing epitope but modify the antigenic surface outside the b12 epitope. Modifications outside the b12 epitope included, but were not limited to, mutations to eliminate CD4 and F105 binding and trimming the V1/V2 to eliminate co-receptor epitopes. Designs of most of the resurfaced proteins were based on the wild-type HXB2 core in PDB ID: 2NXY to optimize expression and folding. However, since the stabilized core version of gp120 HXB2 Ds12F123 eliminates binding to most non-neutralizing antibodies and keeps b12 binding intact, some designs (including RSC3) were based on the stabilized core version of gp120 HXB2 Ds12F123.

[0429] The general algorithm of the resurfacing design is illustrated in FIG. 5A. First, candidate resurfacing positions on gp120 were identified as surface exposed positions that do not contact the antibody (b12) and are not within or near an N-glycosylation site. Next, the set of amino acids allowed at each resurfacing position was assigned semi-automatically, employing a combination of different types of information (evolutionary information, structural and 2 solubility considerations, and similarity/differences with wild-type or pre-existing designs). Finally, RosettaDesign was used to select low energy sequences. Different final designs were generated largely by devising different sets of allowed amino acids at each design position, but also by modifying the design positions themselves. The genes of the resurfaced proteins were synthesized for cloning, and the RC and RSC proteins were expressed and characterized for antigenic properties. What follows are details on the process and the individual designs.

[0430] Identification of Resurfacing Positions.

[0431] CD4- and b12-contacting residues as well as the surface accessibility of each residue on gp120 were determined based on the gp120-CD4 and gp120-b12 structures (PDB ID 2NXY and 2NY7). Surface exposed residues were defined using the program NACCESS (bioinf.manchester.ac.uk/naccess) as residues with >40% side-chain surface area exposed, relative to the same side-chain in an isolated tripeptide. Antibody contact residues were defined as any gp120 residue with at least one heavy atom within 8.0 angstroms of a heavy atom on the antibody. Residues near N-glycosylation sites were defined as any residue with at least one side-chain heavy atom within 6.0 angstroms of any heavy atom on either the Nacetyl-glucosamine (NAG) group or the asparagine of a N-glycosylation site (NXS/T, where X is any residues except proline). Initially, 49 candidate positions were identified on b12-bound gp120 (PDB ID: 2NY7), but the above criteria were relaxed in some cases to allow additional design positions, and in other cases design positions were restricted to generate pairs of molecules with resurfacing mutations at complementary sets of positions.

[0432] Semi-Automatic Assignment of Amino Acid Libraries.

[0433] Different strategies were used to assign libraries of allowed amino acids at each resurfacing position, in order to obtain different final sequences from RosettaDesign. For the design of RSC2, amino acids from a multiple sequence alignment of HIV-1 HXB2 with SIV (hiv.lanl.gov) were allowed (evolutionary information), but most hydrophobic residues were disallowed unless packed on the surface of a beta sheet, and all polar and the native HIV-1 residues were allowed (structural and solubility considerations). RC1 was derived from RSC2 by threading the final RSC2 sequence onto the CD4-bound structure (2NXY) and reverting mutations that would destabilize the CD4-bound conformation. The design of RSC3 was carried out following experimental feedback that RSC2 successfully maintained nM b12 affinity. For RSC3, most mutations from RSC2 were enforced, a wider range of amino acids were allowed at some positions that had not been mutated in RSC2, and additional resurfacing positions were selected based on both exposure and distance from mutations in RSC2. The goal was to ensure that as many potential antibody footprints of area ˜20 Å2 outside the b12-binding site as possible contained at least one mutation. The criteria for resurfacing positions were relaxed for RSC3—eight of the new positions were near a NAG, and six were slightly less than 40% exposed. Finally, the native amino acid was not allowed at the new RSC3 design positions, guaranteeing increased resurfacing surface coverage. Resurfacing positions and allowed amino acids for RC4-8 were designed to increase the resurfaced area and antigenic diversity of RC1, following experimental feedback that RC1 maintained high b12 affinity. RC8 was generated using an expanded set of design positions and nearly only polars were allowed at all design positions. RC7 was generated using the same design positions as RC8, but the amino acids chosen for RC8 were disallowed at most design positions, and native amino acids were disfavored directly by assigning them a small energetic penalty. RC4 and RC5 utilized different resurfacing positions compared to RC1, RC7, and RC8 wherever possible, were restricted to polar mutations, and RC5 was designed to be antigenically different than RC4 by disallowing amino acids chosen for RC4. RC6 used the same design positions as RC1, but expanded beyond those positions, and disallowed the amino acids used in RC1.

[0434] Rosettadesign Parameters.

[0435] In all cases non-exposed amino acids were held fixed at the native rotamer. In most cases surface exposed amino acids that were kept as native were also held fixed at the native rotamer. For design of RSC3, amino acids designed into the parent RSC2 were allowed to repack during design of RSC3. The lowest energy design for a particular combination of resurfacing positions and allowed amino acids was selected for experimental testing.

[0436] RSC2 and RSC3 Sequences.

[0437] The final RSC2 and RSC3 designs contained 34 and 61 mutations relative to the stabilized core (HXB2 Ds12F123) in PDB ID: 2NY7, respectively (not including the V1/V2 trim discussed below). The stabilized core has a total of 330 amino acids, so the resurfacing mutations in RSC2 and RSC3 amounted to modifications of 10% and 18% of the protein, respectively. For RSC3, 82% (50/61) of the mutations were contained in the SIV multiple sequence alignment and 18% (11/61) were not, illustrating that structural and solubility considerations contributed to the design. Only 11 (18%) of the final RSC3 mutations were 4 contained within the sequence of SIVmac32H, illustrating the importance of using a multiple sequence alignment rather than a single sequence. Mutations for all the resurfaced proteins are highlighted in the sequence alignment in FIG. 5B.

[0438] Eliminating CD4 and F105 Binding.

[0439] RSC2 and RSC3 were designed on the stabilized core that already eliminates F105 binding. To eliminate CD4 binding, the resurfacing described above was expected to suffice due to mutations of two CD4 contact residues in the β20/21 (mutations were N425G and W427V) and due to the favored b12-bound conformation of the β20/21 over the bridging sheet conformation necessary for CD4 binding (by mutations in β20/21 and in α1 which is linked to β2021 by a disulfide in RSC3). To eliminate F105-binding for RC1 and RC4-8 mutations at key F105 contact locations were added to the resurfacing design. To eliminate CD4 binding for RC1 and RC4-8, the β20/21 was truncated to GG between I423 and Y435.

[0440] V1/V2 Stem Trimming.

[0441] The V1/V2 was trimmed differently in different constructs, attempting to find minimal truncation while maintaining high protein expression. RSC2 utilized the same V1N2 trim as the stabilized core in the b12-crystal structure (PDB ID: 2NY7), but RSC3 had a more aggressively truncated V1/V2 (see alignment in FIG. 5B). RC1 and RC4-8 used a V1/V2 trim sequence of VKLTPLAGATSVITQA (SEQ ID NO. 1466) between C119 and C205.

[0442] Protein Expression and Purification.

[0443] Genes for HXB2 core, the stabilized core (HXB2 Ds12F123) and the designed RC and RSCs were each synthesized with a C-terminal His tag by GeneArt (Regensburg, Germany), and cloned into a mamalian CMV/R expression vector. Proteins were produced by transient tranfection using 293fectin (Invitrogen, Carlsbad, Calif.) in 293F cells, a human embryonic kidney cell line (Invitrogen) maintained in serum-free free-style medium (Invitrogen). Culture supernatants were harvested 4-5 days after transfection, filtered through a 0.45 μm filter, and concentrated with buffer-exchange into 500 mM NaCl, 50 mM Tris (pH 8.0). Proteins were first purified by Co-NTA (cobalt-nitrilotriacetic acid) chromatography method using a HiTrap IMAC HP column (GE Healthcare, Piscataway, N.J.). The peak fractions were collected, and further purified by gel-filtration using a HiLoad 16/60 Superdex 200 pg column (GE Healthcare). The fractions containing monomers of each protein were combined, concentrated and flash frozen at −80° C. To generate the surface plasmon resonance (SPR) data 5 shown in FIG. 2C and FIGS. 8 and 9, both RSC3 and the stabilized core (Ds12F123) were further purified using b12 affinity column. Monomeric gp120s were expressed by transient transfection of 293F cells.

[0444] Surface Plasmon Resonance (SPR).

[0445] The binding kinetics of gp120 variants with different ligands were assessed by SPR analysis on Biacore 3000 or Biacore T-100 (GE Healthcare). HIV6 1 gp120-reactive ligands (CD4-Ig and specific mAbs) were either immobilized directly onto a CMS sensor chip with standard amine coupling or captured with a mouse anti-human IgG Fc antibody supplied in the “human antibody capture kit” (GE Healthcare) to a surface density about 300 response units (RU). Variant gp120s at 5-200 nM were first passed over the modified sensor chips at 30 μl/min for 3-4 minutes, followed by a 5 minutes dissociation phase to identify rough binding affinities. Then a 2-fold increasing series of gp120 concentrations were passed over the chip, with the concentration of the series adjusted so that at least three runs resulted in maximum 10-150 RU.

[0446] Accompanying each gp120 series, blank reference using buffer to mock gp120 was included. The buffer in all studies was 10 mM HEPES, pH 7.4, 150 mM NaCl, 3 mM EDTA, and 0.01% surfactant P-20. Sensorgrams were corrected with blank reference and fit globally with Biacore Evaluation software using a 1:1 Langmuir model of binding. Although CD4-Ig and other ligands might formally be analyzed with a two-state binding model, such treatment should not affect the primary on-rates nor overall KDs reported here.

[0447] ELISA analyses. Each antigen in PBS (pH 7.4) at 2 μg/ml was used to coat plates overnight at 4° C. Coated plates were blocked with B3T buffer (150 mM NaCl, 50 mM Tris-HCl, 1 mM EDTA, 3.3% fetal bovine serum, 2% bovine albumin, 0.07% Tween 20) for 1 hour at 37° C., followed by incubation with sera or antibody serially diluted in B3T buffer for 1 hour at 37° C. Horseradish peroxidase (HRP)-conjugated goat anti-human IgG Fc antibody (Jackson ImmunoResearch Laboratories Inc., West Grove, Pa.) at 1:10,000 was added for 1 hour at 37° C. All volumes were 100 μl/well except that 200 μl/well was used for blocking. Plates were washed between each step with 0.1% Tween 20 in PBS. Plates were developed using either 3,3′,5,5′-tetramethylbenzidine (TMB) (Kirkegaard & Perry Laboratories) and read at 450 nm, or ophenylenediamine dihydrochloride (Sigma) and read at 490 nm. For competitive ELISA analyses, plates were coated with 1 μg/ml of a sheep anti-gp120 C5 antibody, D7324 (Cliniqa Corp., Fallbrook, Calif.) or 10 μg/ml of Galanthus nivalis lectin (Sigma) to capture 2 μg/ml of purified YU2 gp120 or RSC3 respectively. After blocking, serial dilutions of the competitor antibodies or CD4-Ig were added to the captured gp120 or RSC3 in 50 μl of B3T buffer, followed by adding 50 μl of biotin-labeled antibody at fixed concentrations: 100 ng/ml for VRC01 and VRC02 for both proteins, 4 μg/ml for VRC03 for YU2 gp120 or 100 ng/ml for RSC3, and 20 ng/ml for 17b for YU2 gp120. The plates were incubated at 37° C. for 1 hour, followed by incubation with 250 7 ng/ml of streptavidin-HRP (Sigma) at ambient temperature for 30 minutes, and developed with TMB as described.

[0448] Isothermal Titration Calorimetry (ITC).

[0449] Isothermal titration calorimetry (ITC) was carried out using ITC200 microcalorimeter system from MicroCal, Inc. All proteins were thoroughly dialyzed against PBS before use. The dialysis buffer was filtered through a 0.2 μm membrane and used to dilute the protein samples. The concentration of gp120 in the sample cell was approximately 5 μM and that of CD4-Ig or mAbs in the syringe was approximately 25 μM. The molar concentrations of the proteins were calculated using the following molar extinction coefficients: gp120, 1.52; CD4-Ig, 1.2; b12, 1.46; VRC01, 1.53; VRC03, 1.57. Gp120 in the sample cell were titrated to saturation by the stepwise addition of 2 μl of ligand from the syringe at 120-sec intervals at 37° C. The heat evolved upon each injection was obtained from the integral of the calorimetric signal. The values for enthalpy (ΔH) and entropy (ΔS) were obtained by fitting the data to a nonlinear least-squares analysis with Origin software.

[0450] Viral Entry, Neutralization and Protein Competition Assays.

[0451] Neutralization was measured using single round infection by HIV-1 Env-pseudoviruses and TZM-bl target cells. Neutralization curves were fit by nonlinear regression using a 5-parameter hill slope equation. The 50% and 80% inhibitory concentrations (IC50 and IC80) were reported as the antibody concentrations required to inhibit infection by 50% and 80% respectively. Competition of serum or mAb neutralization was assessed by adding a fixed concentration (25 μg/ml) of the RSC3 or ΔRSC3 glycoprotein to serial dilutions of antibody for 15 min prior to the addition of virus. The resulting IC50 values were compared to the control with mock protein added. The neutralization blocking effect of the proteins was calculated as the percent reduction in the IC50 value of the antibody in the presence of protein compared to PBS. Synergistic or additive neutralization was assessed by mixing a fixed concentration (10 μg/ml) of the test antibody with serial dilutions of sCD4, CD4-Ig or VRC01 for 15 min prior to the addition of virus. The baseline of viral entry at each concentration of sCD4, CD4-Ig or VRC01 was used to calculate the adjusted percent neutralization. Neutralization was also assessed 8 using Env-pseudoviruses generated by 293T transfection using the pNL4-3 ΔEnv HIV-1 backbone containing a luciferase reporter gene to infect activated PBMC. Neutralizations using uncloned PBMC-derived HIV-1 primary isolates were performed by single-round infection of either TZM-bl cells using luciferase as readout, or activated PBMC using flow cytometry staining for HIV-1 p24 antigen. CD4-facilitated virus entry was performed in the CCR5+/CD4− cell line Cf2Th/syn CCR5 with Env-pseudoviruses containing the luciferase pNL4-3 ΔEnv HIV-1 backbone. A mixture of 40 μl of viral stock and 10 μl of serial dilutions of sCD4, CD4-Ig or VRC01 was incubated at 37° C. for 30 min before adding 1×104 Cf2Th/syn CCR5 cells. Virus entry was measured 2 days later by luciferase activity in cell lysates.

[0452] Construction of the HIV-1 Envelope Sequence Dendrogram.

[0453] HIV-1 gp160 protein sequences (excluding the signal peptide) of HXB2 and the 190 isolates used in the neutralization assays were aligned using MUSCLE, for multiple sequence comparison by log-expectation. The protein distance matrix was calculated by “protdist” and the dendrogram was constructed using the neighbor joining method by “Neighbor”. All analysis and the programs used were performed at the NIAID Biocluster (niaid-biocluster.niaid.nih.gov). The tree was displayed with Dendroscope. Isolation of antigen-specific memory B cells by fluorescence activated cell sorting (FACS). The plasmid constructs for RSC3 and ΔRSC3 were modified by the addition of the sequence encoding the Avi-tag signal for biotinylation (LNDIFEAQKIEWHE, SEQ ID NO: 26) at the 3′ end of the gene, and the modified genes were subcloned into the CMV/R expression vector. After expression and purification, the proteins were biotinylated at 40 μM utilizing biotin ligase Bir A (Avidity, Denver, Colo.) at 30° C. for 30 min, followed by removal of excess free biotin and buffer exchange with PBS (pH 7.4) using a 30-kDa Centricon plus filter (Millipore). Biotinylation of the RSC proteins was confirmed by ELISA. To conjugate proteins with the streptavidin-fluorochrome reagents, in a stepwise process, 1/5 of the molar equivalent of the streptavidin-fluorochrome reagent was added to the biotinylated RSC3 or ΔRSC3 at 20-min intervals until the molar ratio of streptavidin-fluorochrome reagent: biotinylated protein reached 1:1. The incubation was carried out at 4° C. with gentle rocking. Streptavidin-allophycocyanin (SA-APC) (Invitrogen) was 9 mixed with biotinylated RSC3 and streptavidin-phycoerythrin (SA-PE) (Sigma) was mixed with biotinylated ΔRSC3. Thus, each protein carried a different fluorochrome: RSC3—SA-APC and ΔRSC3—SA-PE.

[0454] Antigen specific B cells were identified with a panel of ligands including fluorescently labeled antibodies for CD3, CD8, CD19, CD20, CD27, CD14, IgG and IgM. PBMC were stained with an antibody cocktail consisting of anti-CD3-APC-Cy7 (BD Pharmingen), CD8-Qdot705 (VRC), CD19-Qdot585 (VRC), CD20-Pacific Blue (VRC), CD27-APC-AlexaFluor700 (Beckman Coulter), CD14-Qdot800 (VRC), IgG-FITC (BD Pharmingen), and IgM-PE-Cy5 (BD Pharmingen). In addition, aqua blue (Invitrogen) was used to exclude dead cells. A total of 25 million cryopreserved PBMC were thawed and resuspended in 10 ml RPMI 1640 medium (Invitrogen) with 10% fetal bovine serum pre-warmed to 37° C. and treated with 20 μg/ml DNase I (New England Biolabs, Ipswich, Mass.), followed by centrifugation at 860×G for 5 min. Medium was removed and the cells were resuspended in 10 ml chilled PBS followed by centrifugation at 860 ×G for 5 min. The cell pellet was resuspended in 50 μl of chilled PBS with the aqua blue dye and stained at 4° C. in dark for 20 min. The antibody cocktail and the RSC3 and ΔRSC3 multimers, in a total volume of 50 μl, was added to the cells and incubated at 4° C. in dark for 1 hour. The cells were washed with 10 ml cold PBS, resuspended in 2 ml cold PBS and passed through a 70 μm cell mesh (BD Biosciences). The stained PBMC were analyzed and sorted using a modified 3-laser FACSAria cell sorter using the FACSDiva software (BD Biosciences). Fluorescence compensation was performed using anti-mouse Ig Kappa compensation beads (BD Biosciences) stained with each antibody in a separate tube. For the CD3-APC-Cy7 antibody, anti-mouse IgH&L COMPtrol beads (Spherotech, Lake Forrest, IL) were used and the aqua blue fluorescence was compensated using pre-labeled amine-beads. Single cells with the phenotype of CD3−, CD8−, aqua blue-, CD14−, CD19+, CD20+, IgG+, IgM−, RSC3+ and ΔRSC3− were defined as CD4bs directed antigen specific B cells, and single cells were sorted into 96-well PCR plates containing 20 μl of lysis buffer per well. The lysis buffer contained 0.5 μl of RNase Out (Invitrogen), 5 μl of 5× first strand buffer (Invitrogen), 1.25 μl of 0.1M DTT (Invitrogen) and 0.0625 μl of Igepal (Sigma). The PCR plates with sorted cells were quickly frozen on dry-ice and stored at −80° C. The total content of the patient PBMC sample 10 passing through the sorter was saved in FCS files for further analysis with FlowJo software (TreeStar, Cupertino, Calif.).

[0455] Single B-Cell RT-PCR and Subsequent Sequencing and Cloning.

[0456] For each sorted cell, the IgG heavy and the corresponding Ig light chain gene transcripts were amplified by RT-PCR and cloned into eukaryotic expression vectors to produce full IgG1 antibodies. The frozen plates with single B-cell RNA were thawed at room temperature, and the RT reaction was carried out by adding 3 μl of random hexamers at 150 ng/μ, 2 μl of dNTP mix, each at 10 mM, and 1 μl of SuperScript III (Invitrogen) into each well. The thermocycle program for RT was 42° C. for 10 min, 25° C. for 10 min, 50° C. for 60 min and 94° C. for 5 min. The cDNA plates were stored at −20° C., and the IgH, Igκ and Igλ variable region genes were amplified independently by nested PCR starting from 5 μl of cDNA as template. All PCRs were performed in 96-well PCR plates in a total volume of 50 μl containing water, 5 μl of 10× buffer, 1 μl of dNTP mix, each at 10 mM, 1 μl of MgC12 at 25 mM (Qiagen) for 1st round PCR or 10 μl 5× Q-Solution (Qiagen) for 2nd round PCR, 1 μl of primer or primer mix for each direction at 25 μM, and 0.4 μl of HotStar Taq DNA polymerase (Qiagen). Each round of PCR was initiated at 94° C. for 5 min, followed by 50 cycles of 94° C. for 30 sec, 58° C. for IgH and Igκ or 60° C. for Igλ for 30 sec, and 72° C. for 1 min, followed by 72° C. for 10 min. The positive 2nd round PCR products were cherry-picked for direct sequencing with both forward and reverse PCR primers. PCR products that gave a productive IgH, Igκ or Igλ rearranged sequence were re-amplified from the 1st round PCR using custom primers containing unique restriction digest sites and subsequently cloned into the corresponding Igyl, Igκ and Igλ expression vectors. The full-length IgG1 was expressed by cotransfection of 293F cells with equal amounts of the paired heavy and light chain plasmids, and purified using a recombinant protein-A column (GE Healthcare).

[0457] Igg Gene Family Analysis.

[0458] The IgG heavy and light chain nucleotide sequences of the variable region were analyzed with JoinSolver (Joinsolver.niaid.nih.gov) and using the IMGT database (imgt.cines.fr). Normal donor peripheral blood data originated from 120 IgD+CD27+ and 97 IgD-CD27+ sequences pooled for heavy chain analysis and 167 mutated IgM+ sequences for kappa chain analysis. The VRC mAb VK gene use was 11 determined by homology to germline genes in the major 2p11.2 IGK locus. VRC mAb D gene use was determined by homology to genes in the major 14q32.33 IGH locus.

[0459] Env and CCR5 Cell Surface Staining.

[0460] 293T cells were transfected with plasmid DNA encoding JRFL Env to express the envelope glycoprotein on the cell surface. Cells were stained with anti-Env mAbs. The FACS signal was generated by adding a secondary antibody, goat anti-human IgG F(ab′)2 conjugated with phycoerythrin (SouthernBiotech), at 1:125. Data were collected using flow cytometry with the BD LSR Flow Cytometer, and binding curves were generated by plotting the mean fluorescence intensity (MFI) as a function of antibody concentration. To assess gp120 binding to CCR5 on the surface of cells, biotinylated gp120 was used at 5 μg/ml to stain the CCR5 expressing canine thymus cell line, Cf2Th/syn CCR5. Prior to the staining of Cf2Th/syn CCR5 cells, biotinylated gp120 was incubated with ligands including CD4-Ig, VRC01, VRC02, VRC03 and b12 at serial concentrations ranging from 0.04-25 μg/ml. A streptavidin-APC conjugate (Invitrogen) was used at 1 μg/ml to stain Cf2Th/syn CCR5 cells to generate FACS signal, and binding data were collected using flow cytometry with the BD LSR Flow Cytometer. All the staining and incubations were carried out at room temperature for 1 hour.

[0461] Statistical Analysis.

[0462] Statistical analyses were performed using GraphPad Prism version 5.0 (GraphPad Software Inc.). A two-sided Fisher's Exact Test at alpha=0.05 was used for assessing the relationship between the viral sensitivity to serum 45 IgG and to VRC01. Among the viruses that were sensitive to both, Deming Regression was used to model the relationship on the log 10 scale, allowing for measurement error in the IC50s for both the serum IgG and the mAb. These models were run under the assumption of equal error variance. As a sensitivity analysis, the regression models were rebuilt with an estimated variance ratio; although the slope estimate changed slightly, the conclusions were consistent.

[0463] The amino acid sequences of the heavy and light chains of VRC01, VRC02 and VRC03 are shown below (SEQ ID NOs: 1-4, 27 and 28). Bold residues indicate the locations of the CDRs. Exemplary nucleic acid sequences encoding the heavy and light chains of VRC01, VRC02 and VRC03 (SEQ ID NOs: 29-34) are also shown below.

VRC01 Heavy Chain (SEQ ID NO: 1):
QVQLVQSGGQMKKPGESMRISCRASGYEFIDCTLNWIRLAPGKRPEWMGWLKPRGGAVNYARPL
QGRVTMTRDVYSDTAFLELRSLTVDDTAVYFCTRGKNCDYNWDFEHWGRGTPVIVSSP
VRC01 Light Chain (SEQ ID NO: 2):
EIVLTQSPGTLSLSPGETAIISCRTSQYGSLAWYQQRPGQAPRLVIYSGSTRAAGIPDRFSGSRWGPDY
NLTISNLESGDFGVYYCQQYEFFGQGTKVQVDIKR
VRC02 Heavy Chain (SEQ ID NO: 3):
QVQLVQSGGQMKKPGESMRISCQASGYEFIDCTLNWVRLAPGRRPEWMGWLKPRGGAVNYARPL
QGRVTMTRDVYSDTAFLELRSLTADDTAVYYCTRGKNCDYNWDFEHWGRGTPVTVSSA
VRC02 Light Chain (SEQ ID NO: 4):
EIVLTQSPGTLSLSPGETAIISCRTSQYGSLAWYQQRPGQAPRLVIYSGSTRAAGIPDRFSGSRWGPDY
NLTIRNLESGDFGLYYCQQYEFFGQGTKVQVDIKR
VRC03 Heavy Chain (SEQ ID NO: 27):
QVQLVQSGAVIKTPGSSVKISCRASGYNFRDYSIHWVRLIPDKGFEWIGWIKPLWGAVSYARQLQG
RVSMTRQLSQDPDDPDWGVAYMEFSGLTS/PADTAEYFCVRRGSCDYCGDFPWQYWGQGTWWSS
A
VRC03 Light Chain (SEQ ID NO: 28):
EIVLTQSPGILSLSPGETATLFCKASQGGNAMTWYQKRRGQVPRLLIYDTSRRASGVPDRFVGSGSG
TDFFLTINKLDREDFAVYYCQQFEFFGLGSELEVH
VRC01 Heavy Chain (SEQ ID NO: 29):
CAGGTGCAGCTGGTGCAGTCTGGGGGTCAGATGAAGAAGCCTGGCGAGTCGATGAGAATTTCTT
GTCGGGCTTCTGGATATGAATTTATTGATTGTACGCTAAATTGGATTCGTCTGGCCCCCGGAAAA
AGGCCTGAGTGGATGGGATGGCTGAAGCCTCGGGGGGGGGCCGTCAACTACGCACGTCCACTTC
AGGGCAGAGTGACCATGACTCGAGACGTTTATTCCGACACAGCCTTTTTGGAGCTGCGCTCGTTG
ACAGTAGACGACACGGCCGTCTACTTTTGTACTAGGGGAAAAAACTGTGATTACAATTGGGACT
TCGAACACTGGGGCCGGGGCACCCCGGTCATCGTCTCATCACC
VRC01 Light Chain (SEQ ID NO: 30):
GAAATTGTGTTGACACAGTCTCCAGGCACCCTGTCTTTGTCTCCAGGGGAAACAGCCATCATCTC
TTGTCGGACCAGTCAGTATGGTTCCTTAGCCTGGTATCAACAGAGGCCCGGCCAGGCCCCCAGGC
TCGTCATCTATTCGGGCTCTACTCGGGCCGCTGGCATCCCAGACAGGTTCAGCGGCAGTCGGTGG
GGGCCAGACTACAATCTCACCATCAGCAACCTGGAGTCGGGAGATTTTGGTGTTTATTATTGCCA
GCAGTATGAATTTTTTGGCCAGGGGACCAAGGTCCAGGTCGACATTAAGCGA
VRC02 Heavy Chain (SEQ ID NO: 31):
CAGGTGCAGCTGGTGCAGTCTGGGGGCCAGATGAAGAAGCCTGGCGAGTCGATGAGAATTTCTT
GTCAGGCTTCCGGATATGAATTTATTGATTGTACACTAAATTGGGTTCGCCTGGCCCCCGGAAGA
AGGCCTGAATGGATGGGATGGCTGAAGCCTCGAGGGGGGGCCGTCAACTACGCACGTCCACTTC
AAGGCAGAGTGACCATGACTCGAGACGTGTATTCCGACACAGCCTTTTTGGAGCTGCGCTCCTTG
ACAGCAGACGACACGGCCGTCTACTATTGTACTAGGGGAAAAAATTGTGATTACAATTGGGACT
TCGAACACTGGGGCCGGGGTACCCCGGTCACCGTCTCATCAGCC
VRC02 Light Chain (SEQ ID NO: 32):
GAAATTGTGTTGACACAGTCTCCAGGCACCCTGTCTTTGTCTCCAGGGGAAACAGCCATCATCTC
TTGTCGGACCAGTCAGTATGGTTCCTTAGCCTGGTATCAACAGAGGCCCGGCCAGGCCCCCCGGC
TCGTCATCTATTCGGGCTCTACTCGGGCCGCAGGCATCCCAGACAGGTTCAGCGGCAGTCGGTGG
GGGCCAGACTACAATCTCACCATCAGGAACCTGGAGTCGGGAGATTTTGGTCTTTATTATTGCCA
GCAGTATGAATTTTTTGGCCAGGGGACCAAGGTCCAGGTCGACATTAAGCGA
VRC03 Heavy Chain (SEQ ID NO: 33):
CAGGTGCAGCTGGTGCAGTCTGGGGCTGTGATTAAGACGCCTGGGTCCTCAGTGAAGATCTCAT
GTCGGGCTTCTGGATACAACTTTCGTGATTATTCGATCCATTGGGTCCGCCTCATTCCTGACAAG
GGATTTGAGTGGATTGGATGGATTAAACCTCTGTGGGGTGCCGTCAGTTATGCCCGGCAACTTCA
GGGCCGAGTCTCTATGACTCGACAATTATCTCAAGACCCAGACGACCCGGACTGGGGCGTTGCC
TACATGGAGTTCAGTGGACTGACGT/CCCGCCGACACGGCCGAATATTTTTGTGTCCGGAGAGGG
TCCTGTGATTATTGCGGAGACTTTCCCTGGCAATACTGGGGTCAGGGCACCGTCGTCGTCGTCTC
GTCAGCG
VRC03 Light Chain (SEQ ID NO: 34):
GAAATTGTGTTGACGCAGTCTCCCGGCATCCTGTCTCTGTCTCCAGGAGAGACAGCCACCCTCTT
TTGTAAGGCCAGTCAGGGTGGCAATGCTATGACGTGGTATCAGAAGAGACGTGGCCAGGTTCCC
AGACTCCTGATCTACGATACATCTCGCAGGGCCTCTGGCGTTCCTGACAGATTTGTTGGCAGTGG
GTCTGGGACAGACTTCTTTCTCACGATCAACAAATTGGACCGGGAAGATTTCGCAGTCTATTATT
GTCAACAATTTGAATTTTTTGGCCTGGGGAGCGAGCTGGAAGTCCATCGA

### Example 2

### Characterization of the Atomic Structure of VRC01 and gp120

[0464] This example describes the crystal structure for one of the VRC01 antibody in complex with an HIV-1 gp120 core. As disclosed herein the molecular basis of VRC01 neutralization is deciphered. In addition the mechanisms of natural resistance of HIV are identified and it shown how VRC01 minimizes such resistance.

[0465] To gain a structural understanding of VRC01 neutralization the antigen-binding fragment (Fab) of VRC01 was crystallize in complex with an HIV-1 gp120 from the clade A/E recombinant 93TH057. The crystallized gp120 consisted of its inner domain—outer domain core, with truncations in the variable loops V1/V2 and V3 as well as theN- and C-termini, which are regions known to extend away from the main body of the gp120 envelope glycoprotein. Diffraction to 2.9 Å resolution was obtained from orthorhombic crystals, which contained four copies of the VRC01-gp120 complex per asymmetric unit, and the structure was solved by means of molecular replacement and refined to a crystallographic R value of 19.7% (FIG. 26 and FIG. 47, Table S1).

[0466] The interaction surface between VRC01 and gp120 encompasses almost 2500 Å2, with 1244 Å2 contributed by VRC01 and 1249 Å2 by gp120. On VRC01, both heavy chain (894 Å2) and light chain (351 A2) contribute to the contact surface (FIG. 48, Table S2), with the central focus of binding on the heavy chain—second complementarity—determining region (CDR H2). Over half of the interaction surface of VRC01 (644 Å2) involves CDR H2, a mode of binding that is reminiscent of the interaction between gp120 and the CD4 receptor; CD4 is a member of the V-domain class of the immunoglobulin superfamily, and the CDR2-like region of CD4 is a central focus of gp120 binding (FIG. 27A and FIG. 49, Table S3). For CD4, the CDR2-like region forms antiparallel, intermolecular hydrogen bonds with residues 365gp120 to 368gp120 of the CD4-binding loop of gp120 (FIG. 27B); with VRC01, one hydrogen bond is observed between the carbonyl oxygen of Gly54VRC01 and the backbone nitrogen of Asp368gp120. This hydrogen bond occurs at the loop tip, an extra residue relative to CD4 is inserted in the strand, and the rest of the potential hydrogen bonds are of poor geometry or distance (FIG. 27C and FIG. 50, Table S4). Other similarities and differences with CD4 are found: Of the two dominant CD4 residues (Phe43CD4 and Arg59CD4) involved in interaction with gp120, VRC01 mimics the arginine interaction but not the phenylalanine one (FIG. 27, B and C). Lastly, substantial correlation was observed between gp120 residues involved in binding VRC01 and CD4 (FIG. 32).

[0467] Superposition of the gp120 core in its VRC01— bound form with gp120s in other crystalline lattices and bound by other ligands indicates a CD4-bound conformation [Protein Data Bank (PDB) ID number 3JWD] to be most closely related in structure, with a Ca-root-mean-square deviation of 1.03 Å (FIG. 51, Table S5). Such superposition of gp120s from CD4- and VRC01-bound conformations brings the N-terminal domain of CD4 and the heavy chain—variable domain of VRC01 into close alignment (FIG. 27), with 73% of the CD4 N-terminal domain volume overlapping with VRC01. This domain overlap is much higher than observed with the heavy chains of other CD4-binding-site antibodies, such as b12, b13, or F105 (FIG. 52, Table S6). However, when the VRC01 heavy chain is superimposed—on the basis of conserved framework and cysteine residues—on CD4 in the CD4-gp120 complex, clashes are found between gp120 and the entire top third of the VRC01 variable light chain (FIG. 27D). In its complex with gp120, VRC01 rotates 43° relative to the CD4-defined orientation and translates 6 Å away from the bridging sheet, to a clash-free orientation that mimics many of the interactions of CD4 with gp120, although with considerable variation. Analysis of electrostatics shows that the interaction surfaces of VRC01 and CD4 are both quite basic, although the residue types of contacting amino acids are distinct (FIG. 33). Thus, although VRC01 mimics CD4 binding to some extent, considerable differences are observed.

[0468] When CD4 is placed into an immunoglobulin context by fusing its two N-terminal domains to a dimeric immunoglobulin constant region, it achieves reasonable neutralization. VRC01, however, neutralizes more effectively (FIG. 28A). To understand the structural basis for the exceptional breadth and potency of VRC01, its interactive surface with gp120 was analyzed. VRC01 focuses its binding onto the conformationally invariant outer domain, which accounts for 87% of the contact surface area of VRC01 (FIG. 53, Table S7). The 13% of the contacts made with flexible inner domain and bridging sheet are noncontiguous, and it was noted that these were not critical for binding. In contrast, CD4 makes 33% of its contacts with the bridging sheet, and many of these interactions are essential. The reduction in inner domain and bridging sheet interactions by VRC01 is accomplished primarily by a 6 Åtranslation relative to CD4, away from these regions; critical contacts such as made by Phe43CD4 to the nexus of the bridging sheet—outer domain are not found in VRC01, whereas those to the outer domain (such as Arg59CD4) are mimicked by VRC01.

[0469] To determine the affinity of VRC01 for gp120 in CD4-bound and non-CD4-bound conformations, surface-plasmon resonance spectroscopy was used to measure the affinity of VRC01 and other gp120-reactive antibodies and ligands to two gp120s: a b4-deletion that is restrained from assuming the CD4-bound conformation or a disulfidestabilized gp120 core that is largely fixed in the CD4-bound conformation in the absence of CD4 itself (FIG. 28B and FIG. 34). VRC01 showed high affinity to both CD4-bound and non-CD4-bound conformations, which is a property shared by the broadly neutralizing b12 antibody. In contrast, antibodies F105 and 17b as well as soluble CD4 showed strong preference for either one, but not both, of the conformations. To assess the binding of VRC01 in the context of the functional viral spike, its ability to neutralize variants of HIV-1 with gp120 changes that affect the ability to assume the CD4-bound state was examined. Two of these mutations, His66Ala gp120 and Trp69Leugp120, are less sensitive, whereas a third, Ser375Trpgp120, is more sensitive to neutralization by CD4. VRC01 neutralized all three of these variant HIV-1 viruses with similar potency (FIG. 28C), suggesting that VRC01 recognizes both CD4-bound and non-CD4-bound conformations of the viral spike. This diversity in recognition allows VRC01 to avoid the conformational masking that hinders most CD4-binding-site ligands and to potently neutralize HIV-1. Precise targeting by VRC01. Prior analysis of effective and ineffective CD4-binding-site antibodies suggested that precise targeting to the vulnerable site of initial CD4 attachment is required to block viral entry. This site represents the outer domain contact for CD4. Analysis of the VRC01 interaction with gp120 shows that it covers 98% of this site (FIG. 29, A and B, and FIG. 35), comprising 1089 Å2 on the gp120 outer domain, which is about 50% larger than the 730 Å2 surface covered by CD4. The VRC01 contact surface outside the target site is largely limited to the conformationally invariant outer domain and avoids regions of conformational flexibility. This concordance of binding is much greater than for ineffective CD4-binding-site antibodies as well as for those that are partially effective, such as antibody b12 (FIG. 35). The outer domain-contact site for CD4 is shielded by glycan. Contacts by the VRC01 light chain (Tyr28VRC01 and Ser30VRC01) are made with the protein-proximal N-acetylglucosamine from the N-linked glycan at residue 276gp120. Thus instead of being occluded by glycan, VRC01 makes use of a glycan for binding. Other potential glycan interactions may occur with different strains of HIV-1 because the VRC01 recognition surface on the gp120—outer domain extends further than that of the functionally constrained CD4 interaction surface, especially into the loop D and the often-glycosylated V5 region (FIG. 36).

[0470] In addition to conformational masking and glycan shielding, HIV-1 resists neutralization by antigenic variation. To understand the basis of this natural resistance to VRC01, 17 resistant isolates were analyzed all by threading their sequences onto the gp120 structure (FIG. 36). Variation was observed in the V5 region in resistant isolates, and this variation along with alterations in gp120 loop D appeared to be the source of most natural resistance to VRC01 (FIG. 29C and FIGS. 36 and 37).

[0471] Because substantial variation exists in V5, structural differences in this region might be expected to result in greater than 10% resistance. The lower observed frequency of resistance suggests that VRC01 employs a recognition mechanism that allows for binding despite V5 variation. Examination of VRC01 interaction with V5 shows that VRC01 recognition of V5 is considerably different from that of CD4 (FIG. 38), with Arg61VRC01 in the CDR H2 penetrating into the cavity formed by the V5 and b24 strands of gp120 (FIG. 39). The V5 loop fits into the gap between heavy and light chains; thus, by contacting only the more conserved residues at the loop base, VRC01 can tolerate variation in the tip of the V5 loop (FIG. 29D).

[0472] Examination of the structure of VRC01 was conducted for special features that might be required for its function. A number of unusual features were apparent, including a high degree of affinity maturation, an extra disulfide bond, a site for N-linked glycosylation, a two-amino-acid deletion in the light chain, and an extensively matured binding interface between VRC01 and gp120 (FIG. 30 and FIG. 40). The frequency with which these features were found in HIV-1 Env-reactive antibodies or in human antibody-antigen complexes was assessed (FIG. 41, FIG. 54, Table S8 and FIG. 55, Table S9) and measured the effect of genomic reversion of these features on affinity for gp120 and neutralization of virus (FIG. 30, A to D, and FIGS. 56 and 57, Table S10).

[0473] Higher levels of affinity maturation have been reported for HIV-1—reactive antibodies in general and markedly higher levels for broadly neutralizing ones. These maturation levels could be a by-product of the persistent nature of HIV-1 infection and may not represent a functional requirement. Removal of the N-linked glycosylation or the extra disulfide bond, which connects CDR H1 and H3 regions of the heavy chain, had little effect on binding or neutralization (FIG. 30, A and B, and FIGS. 56 and 57, Table S10). Insertion of two amino acids to revert the light chain deletion had moderate effects, which were larger for an Ala-Ala insertion (50-fold decrease in binding affinity) versus a Ser-Tyr insertion (fivefold decrease in affinity), which mimics the genomic sequence (FIG. 30C and FIGS. 56 and 57, Table S10). Lastly, reversion of the interface was examined with either single-, four-, seven- or 12-mutant reversions. For the single-mutant reversions of the interface to the genomic antibody sequence, all 12 mutations had minor effects [most with a less than two-fold effect on the dissociation constant (Kd), with the largest effect for a Gly54Ser change having a Kd of 20.2 nM] (FIGS. 56 and 57, Table S10). Larger effects were observed with multiple (four, seven, or 12) changes (FIG. 30D and FIGS. 56 and 57, Table S10). Thus, although VRC01 has a number of unusual features, no single alteration to genomic sequence substantially altered binding or neutralization.

[0474] The probability for elicitation of a particular antibody is a function of each of the three major steps in B cell maturation: (i) recombination to produce nascent antibody heavy and light chains from genomic VH-D-J and Vk/l-J precursors, (ii) deletion of auto-reactive antibodies, and (iii) maturation through hypermutation of the variable domains to enhance antigen affinity. For the recombination step, a lack of substantial CDR L3 and H3 contribution to the VRC01-gp120 interface (FIG. 48, Table S2) indicates that specific Vk/l-J or VH(D)J recombination is not required (FIG. 42). The majority of recognition occurs with elements encoded in single genomic elements or cassettes, suggesting that specific joining events between them are not required. Within the VH cassette, a number of residues associated with the IGHV1-02*02 precursor of VRC01 interact with gp120; many of these are conserved in related genomic VHs, some of which are of similar genetic distance from VRC01 (FIGS. 43 and 44). These results suggest that appropriate genomic precursors for VRC01 are likely to occur at a reasonable frequency in the human antibody repertoire.

[0475] Recombination produces nascent B cell—presented antibodies that have reactivities against both self and nonself antigens. Those with autoreactivity are removed through clonal deletion. With many of the broadly neutralizing antibodies to HIV-1, such as 2G12 (glycan reactive) (33, 34), 2F5, and 4E10 (membrane reactive), this appears to be a major barrier to elicitation. Although this remains to be characterized for genomic revertants and maturation intermediates, no autoreactivity has so far been observed with VRC01.

[0476] The third step influencing the elicitation of VRC01-like antibodies is affinity maturation, which is a process that involves the hypermutation of variable domains combined with affinity-based selection that occurs during B cell maturation in germinal centers. In the case of VRC01, 41 residue alterations were observed from the genomic VH gene and 25 alterations from the Vk gene (including a deletion of two residues) (FIG. 45). To investigate the effect of affinity maturation on HIV-1 gp120 recognition, the VH and Vk regions of VRC01 were reverted, either individually or together, to the sequences of their genomic precursors. The affinity and neutralization of these reverted antibodies was tested (FIG. 31A) and this data was combined with the genomic reversion data obtained while querying the unusual molecular features of VRC01 (FIG. 31B). No antibodies containing VH and Vk regions, which were fully reverted to their genomic precursors, bound gp120 or neutralized virus. Binding affinity and neutralization showed significant correlations with the number of affinity matured residues (P<0.0001). Binding to stabilized gp120 did not correlate well with other types of gp120 or to neutralization (FIG. 58, Table S11), which is related in part to greater retention of binding to VRC01 variants with genomically reverted Vk regions. Extrapolation of the correlation to the putative genomic V gene sequences predicted binding affinities of 0.7 T 0.4 mM Kd for gp120 stabilized in the CD4-bound conformation and substantially weaker affinities for nonstabilized gp120s (FIG. 31B and FIG. 46).

[0477] No single affinity maturation alteration appeared to affect affinity by more than ten-fold, suggesting that affinity maturation occurs in multiple small steps, which collectively enable tight binding to HIV-1 gp120. When the effects of VRC01 affinity maturation reversions are mapped to the structure of the VRC01-gp120 complex, they are broadly distributed throughout the VRC01 variable domains rather than focused on the VRC01-gp120 interface. Noncontact residues therefore appear to influence the interface with gp120 through indirect protein-folding effects. Thus, for VRC01 the process of affinity maturation entails incremental changes of the nascent genomic precursors to obtain high-affinity interaction with the HIV-1 Env surface. Receptor mimicry and affinity maturation. The possibility that antibodies use conserved sites of receptor recognition to neutralize viruses effectively has been pursued for several decades. The recessed canyon on rhinovirus that recognizes the unpaired terminal immunoglobulin domains of intercellular adhesion molecule-1 highlights the role that a narrow canyon entrance may play in such occlusion of bivalent antibody combining regions, although framework recognition can in some instances permit entry. Partial solutions such as those presented by antibody b12 (neutralization of ˜40% of circulating isolates) or by antibody HJ16 (neutralization of ˜30% of circulating isolates), a recently identified CD4-binding-site antibody, may allow recognition of some HIV-1 isolates.

[0478] Materials and Methods

[0479] Expression and Purification of HIV-1 gp120 Proteins.

[0480] The codon-optimized plasmid pVRC8400-HIV-1 Clade A/E 93TH057 ΔV123 contains gp120 residues 44-492 with specific deletions at the V1/V2 and V3 regions. The expression construct was made by inserting mouse interleukin-2 (IL-2) leader sequence (MYSMQLASCVTLTLVLLVN, SEQ ID NO: 36) followed by the modified gp120 sequence between the 5′ XbaI and 3′ BamHI sites. In the modified gp120 sequence, N-term residues 31-43 of wild type Clade A/E 93TH057 gp120 were trimmed, amino acids sequences ¹²⁴PLCVTLHCTTAKLTNVTNITNVPNIGNITDEVRNCSFNMTTEIRDKKQKVHALFYKLDIVQIEDKN DSSKYRLINCNT¹⁹⁸ (SEQ ID NO: 37) of the V1/V2 loop and ³⁰²NMRTSMRIGPGQVFYRTGSIT³²³ (SEQ ID NO: 38) of the V3 loop were replaced with GG and GGSGSG (SEQ ID NO: 39) linkers, respectively. YU2 Δβ4 core gp120 was constructed with YU2 gp120 sequence by replacing the 9 residues of β3-β5 loop with a Gly-Gly linker This deletion weakens the binding of CD4 and prohibits formation of the antibody 17b epitope. The 93TH057, YU24β4 core gp120 and HXBc2 Ds12F123 core gp120 were expressed and purified. Briefly 1 L of HEK 293 GnTi— or 293 FreeStyle cells were transiently transfected with the mixture of 500 μg of gp120 DNA plasmid and 1 ml of 293fectin (Invitrogen). The transfected cells were incubated in FreeStyle 293 expression medium (Invitrogen) supplemented with 3% Cell Boost (HyClone) and 2 mM Butyrate (SIGMA) for suspension culture at 8% CO2, 37.0° C. and 125 rpm for five days after transfection. The supernatants for 93TH057 and HXBc2 Ds12F123 5 core gp120 were harvested and proteins purified with a protein A-immobilized 17b antibody affinity column. The YU24β4 core gp120 was purified with a protein A-immobilized F105 antibody affinity column. The gp120 proteins were eluted with IgG elution buffer (Pierce) and immediately adjusted to pH 7.5.

[0481] Production of VRC01 IgG and Antigen-Binding Fragment.

[0482] The VRC01 IgG was expressed and purified. Briefly, heavy and light chain plasmids were transfected into 293F cells using 293Fectin (Invitrogen). The supernatant was harvested 5 days after transfection, filtered through 0.45 μm filter, and followed by purification using immobilized protein A or protein G columns. To produce antigen-binding fragments (Fab), VRC01 IgG was incubated at 37° C. with protease Lys-C (Roche) at a ratio IgG:LysC=4000:1 (w/w) in 10 mM EDTA, 100 mM Tris/Cl—, pH 8.5 for about 12 hours. Uncleaved IgG and the constant fragment (Fc) were removed by passing the digestion mixture through a Protein A affinity column; the flowthrough containing VRC01 Fab was concentrated and loaded onto size-exclusion column (Superdex S200) for further purification.

[0483] Deglycosylation, Complex Formation and Crystallization of the gp120:VRC01 Complexes.

[0484] Deglycosylation of HIV-1 gp120 was performed in a reaction solution containing 1-5 mg/ml gp120, 350 mM NaCl, 100 mM Na Acetate, pH 5.9, 1×EDTA-free protease inhibitor (Roche) and endoglycosidase H (30 units/μg of gp120). After mixing all components and adjusting pH to 5.9, the solution was incubated at 37° C. and the deglycosylation process was monitored by SDS-PAGE until completion. gp120:VRC01 complexes were made. Briefly, VRC01 Fab in 20% molar excess was combined with deglycosylated gp120 and the gp120:VRC01 mixture was passed through a concanavalin A column to remove gp120 with uncleaved N-linked glycans. The complex was then purified by size exclusion chromatography (Hiload 26/60 Superdex S200 prep grade, GE Healthcare) and concentrated to ˜10 mg/ml in 0.35 M NaCl, 2.5 mM Tris pH 7.0, 0.02% NaN3 for crystallization screening studies. To achieve better chances of crystallization hits, two gp120 variants, clade B HxBc2 core Ds12F123 and clade A/E 93TH057, were used to make complexes with the VRC01 Fab. Commercially available screens, Hampton Crystal Screen (Hampton Research), Precipitant Synergy Screen (Emerald BioSystems), and Wizard Screen (Emerald BioSystems), were used for initial crystallization trials of the gp120:VRC01 complexes. Vapor-diffusion sitting drops were set up robotically by mixing 0.1 μl of protein with an equal volume of precipitant solutions (Honeybee, DigiLab). Droplets were allowed to equilibrate at 20° C. and imaged at scheduled times with RockImager (Formulatrix.). Multiple crystal hits were obtained from both HXBc2:VRC01 and 93TH057:VRC01 complexes. Those hits were optimized manually using the hanging drop vapor-diffusion method. Crystals of the HXBc2:VRC01 complex were obtained in 1.0 M NaCltrate, 100 mM NaCacodylate, pH 6.5. For the 93TH057:VRC01 complex, the best condition to obtain diffraction-quality crystals was 10% PEG 8000, 100 mM Tris/Cl—, pH 8.5 with 3% glucose as additive.

[0485] X-Ray Data Collection, Structure Determination and Refinement for the gp120:VRC01 Complex.

[0486] The diffraction of gp120:VRC01 crystals were tested under cryogenic conditions. To search for the best cryo-protectant, protecting effects of six commonly used cryoprotectants, 30% glycerol, 30% ethylene glycol, 15% 2R,3R-butanediol, 40% trihalose, 40% sucrose and 40% glucose, were assessed. Crystals were transferred into solutions which were composed of crystallization reservoir solution with 50% higher concentration of precipitant(s) and each individual cryo-protectant or mixture of cryo-protectants, immediately flash frozen in liquid nitrogen with a cryo-loop (Hampton Research) and mounted under cryo condition)(100K° for data collection. X-ray data were collected at beam-line ID-22 (SER-CAT) at the Advanced Photon Source, Argonne National Laboratory, with 0.82656 Å radiation, processed and reduced with HKL2000). None of the HXBc2:VRC01 crystals diffracted beyond 4 Å resolution and they were not used for data collection. A 2.9 Å data set for the 93TH057:VRC01 crystals was collected using a cryoprotectant solutions containing 15% PEG8000, 100 mM Tris/Cl—, pH 8.5 and 20% glucose and 7.5% 2R,3R-butanediol as cryoprotectants. I/σ ratio was 1.2 at the 2.9 Åshell with 68% completeness. The crystal structure of the 93TH057:VRC01 complex was solved by molecular replacement with Phaser in the CCP4 Program Suite. This crystal belonged to a space group P21 with cell dimensions a=108.6, b=98.3, c=205.3, β=99.7 and contained four molecules per asymmetric unit. The structure of 93TH057 gp120 with β20/β21 region trimmed (PDB #3M4M) was used as an initial model to place the gp120 in the complex. Phaser was able to give a solution with three gp120s initially (RFZ=4.3 TFZ=4.7 PAK=0 LLG=69 8 RFZ=3.5 TFZ=11.8 PAK=0 LLG=234 RFZ=3.7 TFZ=17.5 PAK=0 LLG=485 LLG=1280). With those three gp120s fixed, the CDR-loop-trimmed variable domain (Fv) of antibody b13 (PDB ID 31DX) was used to locate the Fv portion of VRC01 in the complex (RFZ=3.7 TFZ=11.7 PAK=0 LLG=539 RFZ=3.9 TFZ=5.0 PAK=0 LLG=389 RFZ=3.9 TFZ=4.7 PAK=0 LLG=136 LLG=428). Visual inspection of the generated gp120:Fv solutions identified one of gp120s complexed with a symmetry-operated Fv. This new gp120:Fv complex was used as model to perform a new round of molecular replacement, one complex at a time, until all four gp120:Fv complexes were found (Round 1: RFZ=6.6 TFZ=8.9 PAK=0 LLG=72 LLG=243, Round 2: RFZ=5.9 TFZ=16.0 PAK=0 LLG=78 LLG=623, Round 3: RFZ=8.4 TFZ=25.3 PAK=0 LLG=739 LLG=1866, Round 4: RFZ=5.8 TFZ=22.8 PAK=0 LLG=990 LLG=2608). The constant domain of Fab b13 was then used to place one of the VRC01 constant domains with all four previous solutions fixed (RFZ=4.7 TFZ=21.5 PAK=1 LLG=1357 LLG=3313). The newly found constant domain and the gp120:Fv formed a complete 120:VRC01 complex and the other three molecules were generated by superposing this complex with other three gp120s in the asymmetric unit. Further refinement was carried out with PHENIX. Starting with torsion-angle simulated annealing with slow cooling, iterative manual model building was carried out on Xtalview and COOT with maps generated from combinations of standard positional, individual B-factor, TLS refinement algorithms and non-crystallographic symmetry (NCS) restraints. Ordered solvents were added during each macro cycle. Throughout the refinement processes, a cross validation (Rfree) test set consisting of 5% of the data was used. Structure validations were performed periodically during the model building/refinement process with MolProbity and pdb-care. Even though the reported data at the highest shell of 2.9 Å only has I/σ ratio of 1.2, reflections up to 2.7 Å resolution (I/σ>1.0,˜30% completeness) were included and used during the refinement. X-ray crystallographic data and refinement statistics are summarized in FIG. 47, Table 51.

[0487] Surface Plasmon Resonance (SPR).

[0488] The binding kinetics of HIV-1 gp120 with different ligands were performed on Biacore 3000 or Biacore T-100 (GE Healthcare) at 20° C. with buffer HBS-EP+(10 mM HEPES, pH 7.4, 150 mM NaCl, 3 mM EDTA, and 0.05% surfactant P-20). To assess VRC01 recognition of gp120 in the CD4-bound and non-CD4-bound conformation, gp120 molecules (YU24(4 core and HXBc2 Ds12F123 core) were immobilized onto a CM5 chip to 250-500 response units (RUs) with standard amine coupling; Fab antibodies, CD4 or CD4-IgαTP at 2-fold increasing concentrations were injected over the gp120 channels at a flow rate of 30 μl/min for 3 minutes and allowed to dissociate for another 5-10 minutes before regeneration with two 25 μl injections of 4.5 M MgC12 at a flow rate of 50 μl/ml. To test the effects of mutations on VRC01, IgG variants were captured with a mouse anti-human IgG Fc antibody supplied in the “human antibody capture kit” (GE Healthcare) to a surface density about 300 RUs. gp120 series with 2-fold increasing concentrations were passed over the captured IgG flow channels for 3 minutes and allowed to dissociate for another 5-10 minutes at a flow rate of 30 μl/min. The sensor chip was regenerated after each experiment using two 25 μl injections of 4.5 M MgC12 at a flow rate of 50 μl/ml. Sensorgrams were corrected with appropriate blank references and fit globally with Biacore Evaluation software using a 1:1 Langmuir model of binding. Sensorgrams of IgG b12 binding to gp120 could not be fitted with 1:1 Langmuir model and were analyzed with a 10 two-state binding model; such treatment should not affect the primary on-rates nor overall KDs reported here.

[0489] Mutagenesis and creation of VRC01 genomic revertants. Single-4-, 7-, 12-revertant mutations to germline residues of VRC01 as well as the heavy chain C32SC98A mutations, light chain insertions with Ala-Ala or Ser-Tyr after position 30 were listed in FIG. 59, Table S12 and the mutagenesis were carried out using Quikchange kit (Stratagene) according to manufacturer's protocol. V-gene revertants for VRC01 were constructed as follows: For heavy chain Vgene revertant (gH), VRC01 heavy chain V-gene region was reverted to its germline precursor IGHV 1-02*02. For light chain V-gene revertant (gL), VRC01 light chain Vgene region was reverted to its germline precursor IGKV 3-11*01. The modified heavy and light chain genes were synthesized by GeneArt (Regensburg, Germany), and cloned into a mammalian CMV/R vector for expression. All the VRC01 variants were expressed with the same protocol as wild type VRC01 IgG.

[0490] Neutralization Assays.

[0491] Neutralization Assays of Viruses by VRC01 and its Variants:

[0492] HIV-1 Env-pseudoviruses were prepared by transfecting 293T cells (6×10⁶ cells in 50 ml growth medium in a T-175 culture flask) with 10 μg of rev/env expression plasmid and 30 μg of an env-deficient HIV-1 backbone vector (pSG3ΔEnvelope), using Fugene 6 transfection reagents (Invitrogen). Pseudovirus-containing culture supernatants were harvested two days after transfection, filtered (0.45 μm), and stored at −80° C. or in the vapor 11 phase of liquid nitrogen. Neutralization was measured using HIV-1 Env-pseudoviruses to infect TZM-bl cells as described previously. Briefly, 40 μl of virus was incubated for 30 min at 37° C. with 10 μl of serial diluted test antibody in duplicate wells of a 96-well flat bottom culture plate. To keep assay conditions constant, sham media was used in place of antibody in specified control wells. The virus input was set at a multiplicity of infection of approximately 0.01, which generally results in 100,000 to 400,000 relative light units (RLU) in a luciferase assay (Bright Glo, Promega, Madison, Wis.). The antibody concentrations were defined at the point of incubation with virus supernatant. Neutralization curves were fit by nonlinear regression using a 5-parameter hill slope equation. The 50% inhibitory concentrations (IC50) were reported as the antibody concentrations required to inhibit infection by 50%.

[0493] Neutralization Assay of Viruses with Altered Sampling of the CD4-Bound State by VRC01 and CD4.

[0494] Recombinant HIV-1 expressing the firefly luciferase gene was produced by calcium phosphate transfection of 293T cells with the molecular clone pNL4.3 (Env-) Luc and the pSVIIIenv plasmid expressing the wild-type or mutant HIV-1YU2 envelope glycoproteins at a weight ratio of 2:1. Two days after transfection, the cell supernatants were harvested. The reverse transcriptase activities of all virus preparations were measured. Each virus preparation was frozen and stored in aliquots at −80° C. until use. Luciferase-expressing viruses bearing either wild-type or mutant envelope glycoproteins were incubated for 1 hour at 37° C. with serial dilutions of sCD4 or VRC01 IgG in a total 12 volume of 200 μl. The recombinant viruses were then incubated with Cf2Th-CD4/CCR5 cells; luciferase activity in the cells was measured two days later.

[0495] ELISA Assay.

[0496] Clade A/E 93TH057 and clade B HXBc2 core Ds12F123 gp120 in PBS (pH 7.4) at 2 μg/ml were used to coat plates for 2 hours at room temperature (RT). The plates were washed five times with 0.05% Tween 20 in PBS (PBS-T), blocked with 300 μl per well of block buffer (5% skim milk and 2% bovine albumin in PBS-T) for 1 hour at RT. 100 μl of each monoclonal antibodies 5-fold serially diluted in block buffer were added and incubated for 1 hour at RT. Horseradish peroxidase (HRP)-conjugated goat anti-human IgG (H+L) antibody (Jackson ImmunoResearch Laboratories Inc., West Grove, Pa.) at 1:5,000 was added for 1 hour at RT. The plates were washed five times with PBS-T and then developed using 3,3′,5,5′-tetramethylbenzidine (TMB) (Kirkegaard & Perry Laboratories) at RT for 10 min. The reaction was stopped by the addition of 100 μl N H2SO4 to each well. The readout was measured at a wavelength of 450 nm. All samples were performed in triplicate.

[0497] Analysis of the Commonality of VRC01 Features.

[0498] Structural Dataset for Analysis of Antibody Affinity Maturation:

[0499] Initially, the IMGT/3Dstructure-DB was searched for structures of human antibody-protein and antibody-peptide complexes of at most 3.5 Å resolution. This resulted in a set of 54 antibody-protein and 66 antibody-peptide structures (the 2wuc complex was found in both the protein and peptide databases). To complement the structure query, the RSCB PDB was searched for “human fab complex” and structure resolution of at most 3.5 Å, resulting in a set of 290 structure hits; 211 of these had not been identified as part of the IMGT/3Dstructure-DB search. All unique pdbs from the IMGT/3Dstructure-DB database and the PDB search were manually inspected. Additionally, two structures (2b4c and 3hil, see FIG. 58, Table S11) not found in either search were also inspected. To be included in the affinity maturation analysis, pdbs had to possess the following properties: antibody-protein or antibody-peptide complex, IgG antibody of human origin, natural affinity maturation, and antigen not artificially modified for improved binding. In the cases where multiple complexes of the same antibody were identified, only one such complex was used for the analysis. As a result, only 26 of the complexes, shown in FIGS. 56 and 57, Table S10, were retained for the antibody affinity maturation analysis. The list of discarded pdbs, along with the specific reasons for discarding, is shown in FIG. 58, Table S11. For each of the selected 26 antibody complexes, the number of antibody contact residues that were mutated from germline was computed for the antibody V-segments. Contact residues were identified using PISA. Antibody germline genes were identified with IgBLAST (ncbi.nlm.nih.gov/igblast) using antibody protein sequences for the search; insertions/deletions were not counted toward the number of mutations from germline. A summary of the number of contact residues, V-segment mutated residues, and mutated contact residues for the 26 antibodies are shown in FIGS. 56 and 57, Table S10.

### Analysis of Cys Residues, Residue Deletions, and Glycan Additions:

[0500] A dataset of human HIV-1 antibody heavy and light chain sequences was obtained. The final curated version of that dataset that excluded non-specific gp140 14 binders as well as sequences with non-fully-resolved variable regions, included 147 heavy and 147 light chain sequences. Sequence alignment to germline was performed using IMGT/V-QUEST. The number of glycans was computed for the V-D-J heavy and V-J light regions. The number of Cys residues was computed for the V-D-J heavy regions only. The number of residue deletions was computed for the V-segments as compared to the corresponding germline; a deletion of multiple consecutive amino acids was counted as a single deletion.

[0501] Numbering of Amino Acid Residues in Antibody

[0502] the Kabat nomenclature for amino acid sequences in antibodies was followed.

[0503] Protein Structure Analysis and Graphical Representations

[0504] GRASP and APBS were used in calculations of molecular surfaces, volumes, and electrostatic potentials. PISA was used to perform protein-protein interfaces analysis. CCP4 was used for structural alignments. All graphical representation with protein crystal structures were made with Pymol.

### Example 3

### 2F5 Antibody with Enhanced Neutralization Capacity

[0505] The membrane-proximal external region (MPER) of the HIV-1 gp41 transmembrane glycoprotein is the target of three broadly neutralizing anti-HIV-1 antibodies, 2F5, Z13e, and 4E10, and is thus a potential site of HIV-1 vulnerability to the humoral immune response. The MPER encompasses ˜25 residues at the carboxyl-terminal end of the predicted gp41 ectodomain, just before the transmembrane region, and is rich in aromatic residues, typical of bilayer-interfacial regions of membrane proteins. Mutation of selected MPER tryptophans abrogates gp41-mediated fusion of the viral and target cell membranes, indicating that this region is crucial for HIV-1 infectivity. Structural studies of unbound forms of the gp41MPER both in solution and in lipid contexts have demonstrated that it adopts a number of conformations, many of which are _-helical, and electron-paramagnetic resonance measurements have indicated lipid bilayer immersion depths for MPER residues that range from acyl to phospholipid headgroup regions. The binding of neutralizing antibodies, such as 2F5, to the MPER must therefore account for the membrane milieu in which the epitope is found.

[0506] The 2F5 antibody has been shown to exhibit ˜100-fold enhanced binding to its epitope on uncleaved gp140s when presented in the context of lipid proteoliposomes, and other studies have shown that 2F5 can contact phospholipids directly in the absence of gp41. The latter finding has led to the suggestion that 2F5 might be autoreactive, although passive transfusion of 2F5 does not appear to have deleterious effects and 2F5 failed to react in some clinically based assays for autoreactive lipid antibodies. The crystal structures of the 2F5 antibody in complex with its gp41MPER epitope revealed that, despite the 22-residue length of the 2F5 heavy chain third complementarity-determining region (CDR H3) loop, contacts with the gp41MPER peptide are made predominantly at the loop base. In some crystal structures, the tip of the loop protrudes away from gp41, while in others, it is disordered. A unique feature of the tip of the CDR H3 loop is that it contains a patch of hydrophobic residues, including residues L100A, F100B, V100D, and HOOF (Kabat numbering), which, with the exception of HOOF, do not contact gp41 (FIG. 62). While a prior study revealed the importance of residue F100B of the CDR H3 loop in 2F5-neutralizing activity, nonconservative residue substitutions at this position also appeared to diminish 2F5 binding to the immobilized MPER peptide and gp41 in enzyme-linked immunosorbent assay (ELISA) formats. Conversely, a more recent study has shown that alanine mutations in the 2F5 CDR H3 loop can affect neutralization without affecting gp41 binding

[0507] As disclosed herein the role of the chemical nature of residues at the tip of the 2F5 CDR H3 loop in neutralization of HIV-1 is examined. Mutations were introduced into the 2F5 CDR H3 loop that altered its hydrophobicity, and the resulting 2F5 mutants were tested both for binding to a gp41 epitope peptide and for neutralization of HIV-1. The results showed that the tip of the 2F5 CDR H3 loop, and specifically its hydrophobic nature, is required for 2F5-mediated neutralization of HIV-1 by means that appear to be independent both of gp41 affinity and of isolatespecific sensitivity to neutralization by 2F5.

[0508] Materials and Methods

[0509] Antibodies.

[0510] The heavy and light chains of the 2F5 antibody were codon optimized for mammalian expression, synthesized, and transferred separately into the pVRC8400 (CMV/R) mammalian expression vector. Mutations within the 2F5 CDR H3 loop were analyzed for structural compatibility with neighboring residues and were then introduced into the 2F5 heavy-chain plasmid using standard site-directed mutagenesis techniques, implemented by ACGT, Inc., Chicago, Ill. The wild-type and mutant 2F5 heavy- and light-chain plasmids were transiently transfected into 293 Freestyle cells using 293fectin (Invitrogen), and supernatants containing secreted IgGs were harvested 72 to 96 h posttransfection. The IgGs were purified by flowing the supernatants over a protein A-agarose column (Pierce), followed by elution with IgG elution buffer (Pierce).

[0511] Peptides.

[0512] A wild-type gp41MPER peptide corresponding to residues 657 to 669 of gp41 (HxB2 numbering) linked to a C-terminal C9 tag was used and was comprised of the sequence EQELLELDKWASLGGTETSQVAPA (SEQ ID NO: 40)(American Peptide).

[0513] Surface Plasmon Resonance.

[0514] Biacore 3000 (GE Healthcare) was used in tests. 2F5 wild-type and mutant IgGs were coupled directly to Biacore CMS chips at final densities of ˜4,000 to 5,000 response units (RU). The gp41MPER peptide was used as the analyte and flowed over at 2-fold serial dilutions ranging from 500 to 0.49 nM at a flow rate of 30 μl/min for 3 min, followed by injection of standard Biacore HEPES buffer (10 mM HEPES, pH 7.4, 150 mM NaCl, 3 mM EDTA, 0.01% P-20) for 3 min. Binding profiles were analyzed using either Biaevaluation software (GE Healthcare) or Scrubber version 2 (Biologic).

[0515] Virus Neutralization Assays.

[0516] A single-cycle infectivity assay using Envpseudotyped virus and Tzm-bl target cells (NIH AIDS Research and Reference Reagent Program) was used to assess the neutralization capacities of the 2F5 variants. Env from the HIV-1 strains MN, HxB2, JR-FL, SC422661.8, RHPA4259.7, and TRO.11 were used, as were Env from the HIV-2 strain 7312a and the HIV-2-HIV-1 chimera 7312a-C1. Murine leukemia virus (MuLV) Env was used as a negative control.

[0517] Hydrophobicity Analysis.

[0518] Analysis of the free energies of partitioning the 2F5 CDR H3 loop tip into octanol or a lipid bilayer interface was performed using MPex 3.1 software (blanco.biomol.uci.edu/mpex). The analysis was performed on residues 100A to 100F of the 2F5 CDR H3 loop using the Totalizer function, with no end groups added and the ΔCONH value set at 0.

[0519] Statistical Analysis.

[0520] Statistical analyses were performed using GraphPad Prism version 5.0 (GraphPad Software Inc.) and Origin 7 (Originlab Corporation).

[0521] Results

[0522] Predictive measures of hydrophobicity, as determined by scales of free energy for partitioning whole residues from water to a lipid bilayer interface, ΔG_{wif}, or to octanol, ΔG_{oct}, were used to design mutations that would either disrupt or augment the predicted partitioning of the 2F5 CDR H3 tip (residues L100A to I100F) (FIG. 62). The amino acid serine, which is found midway on the ΔG_{wif} and ΔG_{oct} hydrophobicity scales, was chosen as a single or double substitution in order to achieve a gradual decrease in hydrophobicity (FIG. 62C and FIG. 63, Table 1). Conversely, tryptophan, which is the residue most favored to partition into the bilayer interface or octanol, was used to augment the hydrophobicity of the loop (FIG. 62C and FIG. 63, Table 1).

[0523] To ascertain the effect of the CDR H3 tip mutations on binding of 2F5 to the gp41MPER, the affinities of the expressed 2F5 variants for a gp41MPER peptide were determined using surface plasmon resonance. The 2F5 wild-type and mutant IgGs were coupled directly to the biosensor surface, and a gp41 MPER peptide comprised of residues 657 to 669 of gp41 (isolate HxB2 numbering) linked to a C-terminal C9 tag was used as analyte, at 2-fold serial dilutions ranging from 500 to 0.49 nM. As shown in FIG. 63, Table 1 (FIG. 72), all of the mutants maintained nanomolar affinity to the gp41 peptide. In some cases, such as for mutants of I100F, there was a moderate reduction in affinity, likely due to minor contacts made by this residue with gp41.

[0524] The 2F5 mutants were then tested for neutralization of the laboratory-adapted strain HxB2, which is highly sensitive to wild-type 2F5. A single-cycle infectivity assay using Env-pseudotyped virus and Tzm-bl target cells was employed for this purpose. As shown in FIG. 64, top, even single replacements of hydrophobic residues of the CDR H3 loop with serine were able to reduce the neutralization capacity of 2F5 against HxB2 by several orders of magnitude. The most noticeable single mutation effect was observed for the F100BS mutation, which led to a more than 500-fold increase in the 50% inhibitory concentration (IC50) relative to wild-type 2F5 (FIG. 64, top, and FIG. 63, Table 1). The single mutations L100AS and I100FS likewise led to 100-fold increases in the IC50s, while the V100DS mutation increased the IC50 by about 15-fold. Introduction of double mutations to serine at the same residue locations, furthermore, led to complete abrogation of 2F5-mediated neutralization of HxB2, with neutralization profiles indistinguishable from those of the negative control mouse 1D4 anti-rhodopsin antibody (FIG. 64, middle, CDR H3 loop can reduce and completely disrupt 2F5 neutralization, despite maintaining nanomolar affinity for gp41.

[0525] Since these findings could be the result either of a disruption of specific protein contacts made by these residues or of a disruption of nonspecific interactions mediated by their chemical nature, mutation of the same CDR H3 residues to tryptophan was undertaken. Substitutions to tryptophan served two purposes: first, they augmented the hydrophobicity and predicted favorability of free energies of transfer from water to a bilayer interface or to octanol (ΔG_{wif} and ΔGoct), and second, the bulky nature of the tryptophan side chain had the potential to disrupt protein-protein contacts, should they exist. When tested for neutralization of HxB2, the tryptophan mutants were either commensurate with 2F5 wild-type neutralization, such as L100_{A}W and F100_{B}W, or were even more potent, such as V100_{D}W and the double mutant L100_{A}W V100_{D}W, both of which showed an ˜10-fold decrease in the neutralization IC50 relative to wild-type 2F5 (FIG. 64, bottom).

[0526] To rule out the possibility that these results were specific to the HxB2 isolate, the 2F5 mutants were tested for neutralization of a panel of tier 1 and tier 2 HIV-1 isolates, ranging from highly sensitive strains, such as MN, to more resistant ones, such as JR-F1, and also to an HIV-2-HIV-1 2F5 epitope chimera, 7312a-C1. As shown in FIG. 63, Table 1, single mutations that decreased the hydrophobicity of the 2F5 CDR H3 loop led to decreases in neutralization potency, and double mutations that decreased hydrophobicity completely abrogated neutralization. Likewise, single and double mutations that increased the hydrophobicity of the loop led to increased neutralization potencies (FIG. 63, Table 1). Meanwhile, neutralization of the Tro.11 isolate, which has a K665S point mutation in the core of the epitope, was virtually undetectable for all 2F5 mutants, similar to what was observed for viruses pseudotyped with MuLV and parental HIV-2 7312a Env, which were used as negative controls.

[0527] To determine if there was a statistical relationship between the hydrophobicity of the 2F5 CDR H3 loop and the neutralization capacity of the antibody, neutralization IC50s of the 2F5 mutants were plotted against the estimated free energies of transfer, ΔG_{wif}, of the mutant CDR H3s for each of the strains tested. As shown in FIG. 65A and FIG. 66, Table 2, with the exception of RHPA-4259, statistically significant linear relationships were observed between neutralization IC50s and CDR H3 ΔG_{wif}, with P values ranging from 0.0012 for HxB2 to 0.018 for JR-FL. Linear relationships with even more stringent P values were observed between neutralization IC50s and the predicted free energy of transfer to octanol, ΔG_{oct} (FIG. 73A and FIG. 69, Table S1). Associations between the neutralization IC50s and the affinities of the various 2F5 mutants for gp41MPER peptide were also examined. As shown in FIG. 65B and FIG. 66, Table 2, despite the fact that the fits appear to be largely driven by the KD (dissociation constant) of the HOOFS 2F5 mutant for gp41 (which makes minor contacts with the peptide), no statistically significant relationships were observed between the neutralization IC50s of the 2F5 CDR H3 variants and their affinities for the gp41MPER peptide.

[0528] Though the overall levels of the IC50s varied per strain tested, likely a reflection of the strain sensitivity to 2F5 itself, the mutations appeared to exhibit similar effects on neutralization regardless of the strain used. Specifically, no significant differences were observed in the slopes of the linear fits of the neutralization IC50s versus ΔG_{wif} or versus ΔG_{oct}, unlike their y intercepts, which did display significant differences (FIG. 65A, and FIG. 66, Table 2). The similarities in the slopes of the regressions across all strains suggested that the neutralization effects mediated by 2F5 CDR H3 loop hydrophobicity were largely independent of strain sensitivity to 2F5. The free energy of antibody neutralization (ΔG^{N}) can be viewed as a sum of free energies that contribute to its functional interactions with a specific strain of virus. It can also be viewed as a binding association of an antibody “n” with the virion: ΔG^{N}-RT In K(n), where K(n) is defined as IC50/ƒ(n) and ƒ(n) is a function that accounts for variables such as strain sensitivity and assay used. Although an absolute value for this free energy requires the definition of ƒ(n), if ƒ(n1) can be approximated to equal ƒ(n2) for two variants n1 and n2 of the same antibody neutralizing the same strain of virus, a relative free energy, ΔΔG^{N}, can be obtained. In the case of 2F5, it was verified how the free energy of partitioning the CDR H3 loop from water to a lipid bilayer interface, ΔG_{wif}, or to octanol, ΔG_{oct}, correlated with the relative free energy of neutralization (ΔΔG^{N}=ΔG_{2F5wt}^{N}−ΔG_{2F5mut}^{N}). Linear models were used to fit curves of ΔΔG^{N} versus ΔG_{wif} (FIG. 65C) or ΔG_{oct} (FIG. 73C) for each individual strain and for all strains together. The shared correlations obtained were statistically significant, with P<0.0001, although end points at high hydrophobicity suggested linear fits might not be ideal (see below). Nonetheless, the results confirmed that the effects of ΔG_{wif} and ΔG_{oct} of the 2F5 CDR H3 loop on virus neutralization were largely independent of the virus strain, with the normalization relative to 2F5 wild type in the ΔΔG^{N} calculation making the fits for all the strains virtually superimposable (FIG. 65C and FIG. 73C). The shared slopes from these correlations were 1.3 and 1.2 for ΔG_{wif} and ΔG_{oct}, respectively. Thus, the calculated change in the free energy of partitioning the 2F5 CDR H3 loop translates almost directly into changes in neutralization. The 30% enhancement in neutralization, ΔΔG^{N}, over the calculated partition free energy may reflect the planar positioning of these residues in the CDR H3 structure and/or their positioning induced by recognition of the gp41 protein component.

[0529] Though linear regressions provided a reasonable first approximation of the relationship between neutralization IC50s and the free energy of hydrophobic transfer of the tip of the 2F5 CDR H3 loop, it was observed that beyond a certain threshold of loop hydrophobicity, the effects on neutralization appeared to level off. To account for this observation, a quadratic term was added to the linear regressions. This yielded better fits of the data, as judged by an extra sums-of-squares F test (FIG. 67A, FIG. 73B and FIG. 70, Table S2). Based on these quadratic models, IC50 minima were interpolated for each of the strains tested (FIG. 71, Table S3). On average, the interpolated minimum IC50s were approximately 0.96 log units or 9.2-fold lower than the corresponding experimental IC50s of wild-type 2F5 (FIG. 71, Table S3). Compared to the interpolated IC50s corresponding to a ΔG_{wif} of 0, in which no transfer is predicted to occur, the mean minimum IC50s were approximately 5.1 log units or 13.000-fold lower than those predicted for a 2F5 variant with no capacity for hydrophobic transfer (FIG. 71, Table S3). A quadratic term was also added to the fits of the plots of the relative free energies of neutralization, ΔΔG^{N}, versus the predicted free energies of transfer of the 2F5 CDR H3 loop to a bilayer interface, ΔG_{wif}, or octanol, ΔG_{oct}, (FIG. 67B and FIG. 77D). Shared quadratic fits of ΔΔG^{N} versus ΔG_{wif} and ΔG_{oct} were also performed, and ΔΔG^{N} minima were observed at 2F5 CDR H3 ΔG_{wif} and ΔG_{oct} values of −4.08 and −5.69 kcal/mol, with corresponding ΔΔG^{N} values of −1.28 and −1.18 kcal/mol, respectively (FIG. 67C and FIG. 77D).

[0530] Discussion

[0531] The results presented herein suggest that in addition to gp41MPER binding, interactions mediated by the tip of the 2F5 CDR H3 loop are also required for 2F5-mediated neutralization of HIV-1. For the elements of 2F5-mediated neutralization described here, the free energy of 2F5-mediated virus neutralization, ΔG^{N}, can thus be viewed as the sum of the free energy of 2F5 structure-specific recognition of gp41 combined with the free energy of transfer of its CDR H3 loop into a hydrophobic milieu (FIG. 68). While a number of possibilities exist to explain how the tip of the 2F5 CDR H3 mediates neutralization of HIV-1, the finding that mutations to tryptophan were tolerated at three separate locations within the CDR H3 loop, in some cases even augmenting 2F5-mediated neutralization, is consistent with the loop mediating nonspecific hydrophobic interactions. It was surmised that such interactions are more likely to occur at a lipid bilayer interface than within a protein-protein interface, though 2F5 has been shown to tolerate a great deal of sequence variation at its interface with gp41. The finding that correlations of hydrophobicity of the loop and neutralization capacity are largely independent of HIV-1 isolate sensitivity to 2F5, furthermore, suggests that the contacts mediated by the 2F5 CDR H3 loop are distinct from gp41 binding, at least in terms of elements of gp41 not conserved across all strains. The fact that this is true not only for HIV-1 isolates, but also for divergent simian immunodeficiency virus (SIV)-HIV-1 and HIV-2-HIV-1 chimeras, provides additional evidence that 2F5 CDR H3 interactions are not specific for HIV-1 envelope. Because the hydrophobic tip of the CDR H3 represents only a small portion of the surface of antibody 2F5, it seems likely that the reduction in direct binding to lipid vesicles represents an averaging of the alteration in CDR H3 tip hydrophobicity relative to the entire 2F5 antibody. It thus seems reasonable to expect that the full effects of the mutations described herein for neutralization can likely be recapitulated in in vitro lipid binding assays only if the 2F5 CDR H3 loop is properly oriented relative to gp41 and the viral membrane, as it is in the virion/neutralization context, or when the gp41MPER is presented in a proteoliposome context. The difference between an oriented CDR H3 effect (large and significant) and an overall effect on direct biding to lipid vesicles (weak and less significant) may provide an explanation for the lack of 2F5 autoreactivity in in vivo studies; in the former case, the effect is amplified by the precise orientation of the CDR H3 to the viral membrane through binding to the protein component of the MPER epitope, while in the latter case, the effect is minimized by entropic effects and by averaging over the entire surface of the 2F5 antibody. Finally, it was noted that a number of proteins have interfacial binding properties similar to those proposed for 2F5. Soluble phospholipases A2, for instance, show dramatic interfacial activation of catalytic activity and require attachment to membranes to appropriately position a substrate for catalysis. Such systems may allow additional insight into the neutralization mechanism of 2F5. The sizes and hydrophobicities of likely membrane attachment surfaces, for example, are decreased in neurotoxic phospholipases A2, which need to avoid nonspecific membrane interactions during diffusion to the neuronal synapse. Indeed, quadratic fits of our neutralization versus CDR H3 hydrophobicity data resulted in improved correlations and appeared to reveal a threshold beyond which additional hydrophobicity did not enhance neutralization. Overall, these findings have numerous implications for optimization of 2F5 potency and for recreating 2F5-like antibodies in vaccine settings. Variants of 2F5 with tryptophan substitutions are already ˜10-fold more potent than the wild type in terms of neutralization, and future designs of 2F5-based vaccine immunogens may thus need to account not only for structure-specific recognition of gp41 but also for the hydrophobic interactions mediated by the tip of the 2F5 CDR H3 loop.

### Example 4

### HIV-1 Monoclonal Neutralizing Antibodies Specific to gp120 or gp41 for Detecting HIV-1 in a Subject

[0532] This example describes the use of HIV-1 monoclonal neutralizing antibodies specific to gp120 or gp41 for the detection of HIV-1 in a subject. This example further describes the use of these antibodies to confirm the diagnosis of HIV-1 in a subject.

[0533] A biological sample, such as a blood sample is obtained from the patient diagnosed with, or suspected of having an HIV-1 infection. A blood sample taken from a patient who is not infected is used as a control. An ELISA is performed to detect the presence of HIV-1 in the blood sample. Proteins present in the blood samples (the patient sample and control sample) are immobilized on a solid support, such as a 96-well plate, according to methods well known in the art (see, for example, Robinson et al., Lancet 362:1612-1616, 2003, incorporated herein by reference). Following immobilization, HIV-1 monoclonal neutralizing antibodies specific to gp120 or gp41 that is directly labeled with a fluorescent marker is applied to the protein-immobilized plate. The plate is washed in an appropriate buffer, such as PBS, to remove any unbound antibody and to minimize non-specific binding of antibody. Fluorescence can be detected using a fluorometric plate reader according to standard methods. An increase in fluorescence intensity of the patient sample, relative to the control sample, indicates the anti-gp120 or gp41 antibody specifically bound proteins from the blood sample, thus detecting the presence of HIV-1 protein in the sample. Detection of HIV-1 protein in the patient sample indicates the patient has HIV-1, or confirms diagnosis of HIV-1 in the subject.

### Example 5

[0534] HIV-1 Monoclonal Neutralizing Antibodies Specific to gp120 or gp41 for the Treatment of HIV-1

[0535] This example describes a particular method that can be used to treat HIV in a human subject by administration of one or more gp120 or gp 41 specific human neutralizing mAbs. Although particular methods, dosages, and modes of administrations are provided, one skilled in the art will appreciate that variations can be made without substantially affecting the treatment.

[0536] Based upon the teaching disclosed herein HIV-1 can be treated by administering a therapeutically effective amount of one or more of the neutralizing mAbs described herein, thereby reducing or eliminating HIV infection.

### Screening Subjects

[0537] In particular examples, the subject is first screened to determine if they have HIV. Examples of methods that can be used to screen for HIV include a combination of measuring a subject's CD4+ T cell count and the level of HIV in serum blood levels. Additional methods using the gp120- and gp41-specific mAbs described herein can also be used to screen for HIV.

[0538] In some examples, HIV testing consists of initial screening with an enzyme-linked immunosorbent assay (ELISA) to detect antibodies to HIV, such as to HIV-1. Specimens with a nonreactive result from the initial ELISA are considered HIV-negative unless new exposure to an infected partner or partner of unknown HIV status has occurred. Specimens with a reactive ELISA result are retested in duplicate. If the result of either duplicate test is reactive, the specimen is reported as repeatedly reactive and undergoes confirmatory testing with a more specific supplemental test (e.g., Western blot or an immunofluorescence assay (IFA)). Specimens that are repeatedly reactive by ELISA and positive by IFA or reactive by Western blot are considered HIV-positive and indicative of HIV infection. Specimens that are repeatedly ELISA-reactive occasionally provide an indeterminate Western blot result, which may be either an incomplete antibody response to HIV in an infected person, or nonspecific reactions in an uninfected person. IFA can be used to confirm infection in these ambiguous cases. In some instances, a second specimen will be collected more than a month later and retested for subjects with indeterminate Western blot results. In additional examples, nucleic acid testing (e.g., viral RNA or proviral DNA amplification method) can also help diagnosis in certain situations.

[0539] The detection of HIV in a subject's blood is indicative that the subject has HIV and is a candidate for receiving the therapeutic compositions disclosed herein. Moreover, detection of a CD4+ T cell count below 350 per microliter, such as 200 cells per microliter, is also indicative that the subject is likely to have HIV.

[0540] Pre-screening is not required prior to administration of the therapeutic compositions disclosed herein

### Pre-Treatment of Subjects

[0541] In particular examples, the subject is treated prior to administration of a therapeutic agent that includes one or more antiretroviral therapies known to those of skill in the art. However, such pre-treatment is not always required, and can be determined by a skilled clinician.

### Administration of Therapeutic Compositions

[0542] Following subject selection, a therapeutically effective dose of a gp120 or gp41 specific neutralizing mAb described herein is administered to the subject (such as an adult human or a newborn infant either at risk for contracting HIV or known to be infected with HIV). Additional agents, such as anti-viral agents, can also be administered to the subject simultaneously or prior to or following administration of the disclosed agents. Administration can be achieved by any method known in the art, such as oral administration, inhalation, intravenous, intramuscular, intraperitoneal, or subcutaneous.

[0543] The amount of the composition administered to prevent, reduce, inhibit, and/or treat HIV or a condition associated with it depends on the subject being treated, the severity of the disorder, and the manner of administration of the therapeutic composition. Ideally, a therapeutically effective amount of an agent is the amount sufficient to prevent, reduce, and/or inhibit, and/or treat the condition (e.g., HIV) in a subject without causing a substantial cytotoxic effect in the subject. An effective amount can be readily determined by one skilled in the art, for example using routine trials establishing dose response curves. As such, these compositions may be formulated with an inert diluent or with an pharmaceutically acceptable carrier.

[0544] In one specific example, antibodies are administered at 5 mg per kg every two weeks or 10 mg per kg every two weeks depending upon the particular stage of HIV. In an example, the antibodies are administered continuously. In another example, antibodies or antibody fragments are administered at 50 μg per kg given twice a week for 2 to 3 weeks.

[0545] Administration of the therapeutic compositions can be taken long term (for example over a period of months or years).

### Assessment

[0546] Following the administration of one or more therapies, subjects having HIV can be monitored for reductions in HIV levels, increases in a subjects CD4+ T cell count, or reductions in one or more clinical symptoms associated with HIV. In particular examples, subjects are analyzed one or more times, starting 7 days following treatment. Subjects can be monitored using any method known in the art. For example, biological samples from the subject, including blood, can be obtained and alterations in HIV or CD4+ T cell levels evaluated.

### Additional Treatments

[0547] In particular examples, if subjects are stable or have a minor, mixed or partial response to treatment, they can be re-treated after re-evaluation with the same schedule and preparation of agents that they previously received for the desired amount of time, including the duration of a subject's lifetime. A partial response is a reduction, such as at least a 10%, at least 20%, at least 30%, at least 40%, at least 50%, or at least 70% in HIV infection, HIV replication or combination thereof. A partial response may also be an increase in CD4+ T cell count such as at least 350 T cells per microliter.

### Example 6

### Use of Epitope Scaffolds as Immunological Probes

[0548] In order to detect and isolate structure specific antibodies against viral neutralizing determinants, use of heterologous epitope scaffolds can be used.

[0549] Epitope scaffolds are proteins that are surface engrafted with an epitope of choice in a manner that maintains the desired structural conformation of the epitope. In the case of gp41 epitope scaffolds, the gp41 membrane proximal extracellular region (MPER) target of the broadly neutralizing 2F5 antibody is engrafted onto the surface of heterologous proteins in a manner that preserves its 2F5-bound conformation. Five such scaffolds have been developed thus far using a graft that is derived from a clade B virus. Epitope scaffolds with MPER grafts derived from other clades, such as clades C and A and any other clades or gp41 sequences that should be required, are also included as immunological probes in this disclosure. Point mutations within the grafts which knock out binding to 2F5 are also included for use as negative selection agents—in that isolated antibodies directed against the core of the MPER epitope should not be able to bind to these point mutants.

[0550] When used as probes, the gp41MPER epitope scaffolds are biotinylated as previously described (Doria-Rose, et al, Journal of Virology, January 2009, p. 188-199, Vol. 83, No. 1). An Avitag sequence for biotinylation (LNDIPLAQKIEWHE, SEQ ID NO: 26) is added at the c-terminal end of the scaffold (see sequences below). After expression in either mammalian cells (e.g., 293 freestyle cells, Invitrogen) or in E. coli cells (e.g., BL21 cells, Novagen), Biotin ligase Bir A (Avidity, Denver, Colo.) is used to biotinylate the scaffolds at the Avitag sequence.

[0551] Sequences of gp41MPER Epitope Scaffold Immunological Probes (graft are underlined and in bold):

ES1 (1LGYA)
ES1 (1LGYA) Clade B (SEQ ID NO: 11):
EVLEADKWAILGATKYAGIAATAYCRSVVPGNKWDCVQCQKWVPDGKIITTFTSLLSDTNGYVLRS
DKQKTIYLVFRGTNSFRSAITDIVFNFSDYKPVKGAKVHAGFLSSYEQVVNDYFPVVQEQLTAHPTY
KVIVTGHSLGGAQALLAGMDLYQREPRLSPANLSIFTVGGPRVGNPTFAYYVESTGIPFARTVHKRDI
VPHVPPQSFGFLHPGVESWIKSGTSNVQVCGSAIETKDCSNSIVPFTSILDHLSYFDINEGSCLSGLVPR
GSGSHHHHHHGGLNDIFEAQKIEWHE
ES1 (1LGYA) Clade B point mutant (SEQ ID NO: 12):
EVLEADEWAILGATKYAGIAATAYCRSVVPGNKWDCVQCQKWVPDGKIITTFTSLLSDTNGYVLRS
DKQKTIYLVFRGTNSFRSAITDIVFNFSDYKPVKGAKVHAGFLSSYEQVVNDYFPVVQEQLTAHPTY
KVIVTGHSLGGAQALLAGMDLYQREPRLSPANLSIFTVGGPRVGNPTFAYYVESTGIPFARTVHKRDI
VPHVPPQSFGFLHPGVESWIKSGTSNVQVCGSAIETKDCSNSIVPFTSILDHLSYFDINEGSCLSGLVPR
GSGSHHHHHHGGLNDIFEAQKIEWHE
ES1 (1LGYA) Clade C (SEQ ID NO: 13):
EVLALDSWKNLGATKYAGIAATAYCRSVVPGNKWDCVQCQKWVPDGKIITTFTSLLSDTNGYVLR
SDKQKTIYLVFRGTNSFRSAITDIVFNFSDYKPVKGAKVHAGFLSSYEQVVNDYFPVVQEQLTAHPTY
KVIVTGHSLGGAQALLAGMDLYQREPRLSPANLSIFTVGGPRVGNPTFAYYVESTGIPFARTVHKRDI
VPHVPPQSFGFLHPGVESWIKSGTSNVQVCGSAIETKDCSNSIVPFTSILDHLSYFDINEGSCLSGLVPR
GSGSHHHHHHGGLNDIFEAQKIEWHE
ES2 (1KU2A-s)
ES2 (1KU2A-s) Clade B (SEQ ID NO: 14):
ASDPVRQYLHEIGEVLELDKWAELGAAAKVEEGMEAIKKLSEATGLDQELIREVVRAKILGTAAIQ
KIPGLKEKPDPKTVEEVDGKLKSLPKELKRYLHIAREGEAARQHLIEANLRLVVSIAKKYTGRGLSFL
DLIQEGNQGLIRAVEKFEYKRGFAFSTYATWWIRQAINRAIADQARSGLVPRGSGSHHHHHHGGLND
IFEAQKIEWHE
ES2 (1KU2A-s) Clade B point mutant (SEQ ID NO: 15):
ASDPVRQYLHEIGEVLELDEWAELGAAAKVEEGMEAIKKLSEATGLDQELIREVVRAKILGTAAIQK
IPGLKEKPDPKTVEEVDGKLKSLPKELKRYLHIAREGEAARQHLIEANLRLVVSIAKKYTGRGLSFLD
LIQEGNQGLIRAVEKFEYKRGFAFSTYATWWIRQAINRAIADQARSGLVPRGSGSHHHHHHGGLNDI
FEAQKIEWHE
ES2 (1KU2A-s) Clade C (SEQ ID NO: 16):
ASDPVRQYLHEIGEVLALDSWKNLGAAAKVEEGMEAIKKLSEATGLDQELIREVVRAKILGTAAIQ
KIPGLKEKPDPKTVEEVDGKLKSLPKELKRYLHIAREGEAARQHLIEANLRLVVSIAKKYTGRGLSFL
DLIQEGNQGLIRAVEKFEYKRGFAFSTYATWWIRQAINRAIADQARSGLVPRGSGSHHHHHHGGLND
IFEAQKIEWHE
ES3 (2MATA)
ES3 (2MATA) Clade B (SEQ ID NO: 17):
EILELDKWAILGMRVAGRLAAEVLEMIEPYVKPGVSTGELDRICNDYIVNEQHAVSACLGYHGYPK
SVCISINEVVCHGIPDDAKLLKDGDIVNIDVTVIKAGAHGDTSKMFIVGKPTIMGERLCRITQESLYLA
LRMVKPGINLREIGAAIQKFVEAEGFSVVREYCGHGIGGGFHEEPQVLHYDSRETNVVLKPGMTFTIE
PMVNAGKKEIRTMKDGWTVKTKDRSLSAQYEHTIVVTDNGCEILTLRKDDTIPAIISHDSGLVPRGSG
SHHHHHHGGLNDIFEAQKIEWHE
ES3 (2MATA) Clade B point mutant (SEQ ID NO: 18):
EILELDEWAILGMRVAGRLAAEVLEMIEPYVKPGVSTGELDRICNDYIVNEQHAVSACLGYHGYPK
SVCISINEVVCHGIPDDAKLLKDGDIVNIDVTVIKAGAHGDTSKMFIVGKPTIMGERLCRITQESLYLA
LRMVKPGINLREIGAAIQKFVEAEGFSVVREYCGHGIGGGFHEEPQVLHYDSRETNVVLKPGMTFTIE
PMVNAGKKEIRTMKDGWTVKTKDRSLSAQYEHTIVVTDNGCEILTLRKDDTIPAIISHDSGLVPRGSG
SHHHHHHGGLNDIFEAQKIEWHE
ES3 (2MATA) Clade C (SEQ ID NO: 19):
EILALDSWKNLGMRVAGRLAAEVLEMIEPYVKPGVSTGELDRICNDYIVNEQHAVSACLGYHGYPK
SVCISINEVVCHGIPDDAKLLKDGDIVNIDVTVIKAGAHGDTSKMFIVGKPTIMGERLCRITQESLYLA
LRMVKPGINLREIGAAIQKFVEAEGFSVVREYCGHGIGGGFHEEPQVLHYDSRETNVVLKPGMTFTIE
PMVNAGKKEIRTMKDGWTVKTKDRSLSAQYEHTIVVTDNGCEILTLRKDDTIPAIISHDSGLVPRGSG
SHHHHHHGGLNDIFEAQKIEWHE
ES4 (1IWLA)
ES4 (1IWLA) Clade B (SEQ ID NO: 20):
DAASDLKSRLDKVSSFGAGFTQKVTDVQEGQGALAVKRPNLFAWHMTQPDESILVSDGKTLWFYNP
FVEQATATWLKDATGNTPFMLIARNQSSDWQQYNIKQNGDDFVLTPKASNGNLKQFTINVGRDGTI
HQFSAVEQDDQRSSYQLKAQENLEVDKWAFLFGPPQGVTVDDQRKSGLVPRGSGSHHHHHHGGL
NDIFEAQKIEWHE
ES4 (1IWLA) Clade B point mutant (SEQ ID NO: 21):
DAASDLKSRLDKVSSFGAGFTQKVTDVQEGQGALAVKRPNLFAWHMTQPDESILVSDGKTLWFYNP
FVEQATATWLKDATGNTPFMLIARNQSSDWQQYNIKQNGDDFVLTPKASNGNLKQFTINVGRDGTI
HQFSAVEQDDQRSSYQLKAQENLEVDEWAFLFGPPQGVTVDDQRKSGLVPRGSGSHHHHHHGGLN
DIFEAQKIEWHE
ES4 (1IWLA) Clade C (SEQ ID NO: 22):
DAASDLKSRLDKVSSFGAGFTQKVTDVQEGQGALAVKRPNLFAWHMTQPDESILVSDGKTLWFYNP
FVEQATATWLKDATGNTPFMLIARNQSSDWQQYNIKQNGDDFVLTPKASNGNLKQFTINVGRDGTI
HQFSAVEQDDQRSSYQLKAQENLAVDSWKNLFGPPQGVTVDDQRKSGLVPRGSGSHHHHHHGGL
NDIFEAQKIEWHE
ES5 (1D3BB)
ES5 (1D3BB) Clade B (SEQ ID NO: 23):
SKMLQHIDYRMRCIGGAGGIAIGTFKAFGAGMGLILCDCDAFAKIKPKNSKQAEREEKAVGELLELD
KWALLSMTVEGPPPSGLVPRGSGSHHHHHHGGLNDIFEAQKIEWHE
ES5 (1D3BB) Clade B point mutant (SEQ ID NO: 24):
SKMLQHIDYRMRCIGGAGGIAIGTFKAFGAGMGLILCDCDAFAKIKPKNSKQAEREEKAVGELLELD
EWALLSMTVEGPPPSGLVPRGSGSHHHHHHGGLNDIFEAQKIEWHE
ES5 (1D3BB) Clade C (SEQ ID NO: 25):
SKMLQHIDYRMRCIGGAGGIAIGTFKAFGAGMGLILCDCDAFAKIKPKNSKQAEREEKAVGELLALD
SWKNLSMTVEGPPPSGLVPRGSGSHHHHHHGGLNDIFEAQKIEWHE

### Example 7

[0552] Identification of VCR1-like Antibodies

[0553] To demonstrate that light heavy chain complementation can be used to identify a VR01, VCR03-like antibody, VRC01/VRC03 chimera were created and expressed (see FIG. 76). The chimeric antibodies were tested for neutralization of HIV constructs (see FIGS. 77-79). The results of the chimeric neutralization studies demonstrated that complementation predicts an antibody as VRC01 and VRC03-like antibodies. Thus complementation is applied to antibody heavy chain sequences generated by 454 sequencing.

[0554] 454 sequencing was carried out on a sample obtained from subject 45, and 200,000 heavy chain sequences were sorted through these based on threading and retention of specific residues associated with VRC01 and VRC03 to identify VRC01 and VRC03 like antibody sequence. 700 sequences, with a variable sequence identity to VRC01 and VRC03 were obtained. To evaluate whether or not these antibodies can adopt the VRC03 binding mode, their sequences have been “threaded” onto the crystal structure of VRC03/gp120 complex and a so-called threading score was calculated for each of the sequences.

[0555] The use of threading technique allow incorporation the structural information into the 454 sequencing analysis and to select the sequences that can potentially adopt the desired binding mode, which has been precisely characterized by the three structures of antibody/gp120 complexes (see Wu et al. Rational Design of Envelope Identifies Broadly Neutralizing Human Monoclonal Antibodies to HIV-1,” Science 329, 856-861 (2010), which is incorporated herein by reference in its entirety and Zhou et al., “Structural Basis for Broad and Potent Neutralization of HIV-1 by Antibody VRC01, Science 329, 811-817 (2010), which is incorporated herein by reference in its entirety). The threading scores range from 0.07 to 0.13, which are in the lower range of the values calculated from the threading of VRC01 and VRC03 and onto each other (The lower the threading score is, the better the sequence matches the structure). This result indicates that these antibodies are be VRC01-like.

[0556] A sequence alignment of one of these antibody heavy chains (Antibody Heavy Chain No:57203) is shown in FIG. 80 compared to the amino acid sequences of the heavy chains of VRC01, VRC02, and VRC03 and the germline sequence IGHV1-02*02.1N Antibody Heavy Chain No:57203 was synthesize and a chimera between this heavy chain and the light chain of VRC01 was created. These antibodies were tested for neutralization, when combined with VRC01 light chain (see FIG. 81A-81H). Thus, as disclosed herein, a class of VRC01-like antibodies (heavy chain variable domain only) has been identified.

[0557] Below is a list of the heavy chains of VRC01 and VRC03-like antibodies identified. Shown are assigned number of the heavy chain, the deduced germline (germ), the percent identity to VRC01 (seqid1), the percent identity to VRC03 (seqid3), the threading value (thrd1), the divergence from the germline sequence (divg), the nucleic acid sequence identifier and the amino acid sequence identifier.

VRC01 and VRC03-like Antibodies Antibody Heavy Chain No:81364 germ=IGHV1-2*02 seqid1=54.5 seqid3=92.3 thrd1=0.259 thrd3=0.092 divg=0.304 Nucleic acid sequence=SEQ ID NO: 60 Amino acid sequence=SEQ ID NO: 760; Antibody Heavy Chain No:140214 germ=IGHV1-2*02 seqid1=58.7 seqid3=99.2 thrd1=0.305 thrd3=0.031 divg=0.297 Nucleic acid sequence=SEQ ID NO: 61 Amino acid sequence=SEQ ID NO: 761; Antibody Heavy Chain No:64244 germ=IGHV1-2*02 seqid1=59.5 seqid3=99.2 thrd1=0.350 thrd3=0.111 divg=0.297 Nucleic acid sequence=SEQ ID NO: 62 Amino acid sequence=SEQ ID NO: 762; Antibody Heavy Chain No:30181 germ=IGHV1-2*02 seqid1=54.5 seqid3=88.5 thrd1=0.311 thrd3=0.081 divg=0.297 Nucleic acid sequence=SEQ ID NO: 63 Amino acid sequence=SEQ ID NO: 763; Antibody Heavy Chain No:22829 germ=IGHV1-2*02 seqid1=59.5 seqid3=100.0 thrd1=0.310 thrd3=0.031 divg=0.294 Nucleic acid sequence=SEQ ID NO: 64 Amino acid sequence=SEQ ID NO: 764; Antibody Heavy Chain No:34065 germ=IGHV1-2*02 seqid1=59.5 seqid3=100.0 thrd1=0.310 thrd3=0.031 divg=0.294 Nucleic acid sequence=SEQ ID NO: 65 Amino acid sequence=SEQ ID NO: 765; Antibody Heavy Chain No:42537 germ=IGHV1-2*02 seqid1=59.5 seqid3=100.0 thrd1=0.310 thrd3=0.031 divg=0.294 Nucleic acid sequence=SEQ ID NO: 66 Amino acid sequence=SEQ ID NO: 766; Antibody Heavy Chain No:37825 germ=IGHV1-2*02 seqid1=51.2 seqid3=50.8 thrd1=0.167 thrd3=0.140 divg=0.209 Nucleic acid sequence=SEQ ID NO: 67 Amino acid sequence=SEQ ID NO: 767; Antibody Heavy Chain No:12853 germ=IGHV1-2*02 seqid1=47.1 seqid3=42.3 thrd1=0.206 thrd3=0.230 divg=0.209 Nucleic acid sequence=SEQ ID NO: 68 Amino acid sequence=SEQ ID NO: 768; Antibody Heavy Chain No:100463 germ=IGHV1-2*02 seqid1=49.6 seqid3=49.2 thrd1=0.173 thrd3=0.126 divg=0.209 Nucleic acid sequence=SEQ ID NO: 69 Amino acid sequence=SEQ ID NO: 769; Antibody Heavy Chain No:127918 germ=IGHV1-2*02 seqid1=43.0 seqid3=43.1 thrd1=0.211 thrd3=0.142 divg=0.209 Nucleic acid sequence=SEQ ID NO: 70 Amino acid sequence=SEQ ID NO: 770; Antibody Heavy Chain No:25055 germ=IGHV1-2*02 seqid1=57.9 seqid3=51.5 thrd1=0.203 thrd3=0.211 divg=0.206 Nucleic acid sequence=SEQ ID NO: 71 Amino acid sequence=SEQ ID NO: 771; Antibody Heavy Chain No:92641 germ=IGHV1-2*02 seqid1=48.8 seqid3=45.4 thrd1=0.199 thrd3=0.242 divg=0.199 Nucleic acid sequence=SEQ ID NO: 72 Amino acid sequence=SEQ ID NO: 772; Antibody Heavy Chain No:24567 germ=IGHV1-2*02 seqid1=48.8 seqid3=43.1 thrd1=0.142 thrd3=0.124 divg=0.196 Nucleic acid sequence=SEQ ID NO: 73 Amino acid sequence=SEQ ID NO: 773; Antibody Heavy Chain No:60412 germ=IGHV1-2*02 seqid1=47.9 seqid3=41.5 thrd1=0.164 thrd3=0.156 divg=0.196 Nucleic acid sequence=SEQ ID NO: 74 Amino acid sequence=SEQ ID NO: 774; Antibody Heavy Chain No:41501 germ=IGHV1-2*02 seqid1=48.8 seqid3=43.1 thrd1=0.142 thrd3=0.124 divg=0.193 Nucleic acid sequence=SEQ ID NO: 75 Amino acid sequence=SEQ ID NO: 775; Antibody Heavy Chain No:25764 germ=IGHV1-2*02 seqid1=49.6 seqid3=42.3 thrd1=0.192 thrd3=0.136 divg=0.193 Nucleic acid sequence=SEQ ID NO: 76 Amino acid sequence=SEQ ID NO: 776; Antibody Heavy Chain No:25287 germ=IGHV1-2*02 seqid1=47.1 seqid3=44.6 thrd1=0.143 thrd3=0.229 divg=0.189 Nucleic acid sequence=SEQ ID NO: 77 Amino acid sequence=SEQ ID NO: 777; Antibody Heavy Chain No:25949 germ=IGHV1-2*02 seqid1=48.8 seqid3=44.6 thrd1=0.191 thrd3=0.145 divg=0.186 Nucleic acid sequence=SEQ ID NO: 78 Amino acid sequence=SEQ ID NO: 778; Antibody Heavy Chain No:26177 germ=IGHV1-2*02 seqid1=47.1 seqid3=43.8 thrd1=0.209 thrd3=0.169 divg=0.186 Nucleic acid sequence=SEQ ID NO: 79 Amino acid sequence=SEQ ID NO: 779; Antibody Heavy Chain No:32644 germ=IGHV1-2*02 seqid1=47.9 seqid3=45.4 thrd1=0.161 thrd3=0.166 divg=0.182 Nucleic acid sequence=SEQ ID NO: 80 Amino acid sequence=SEQ ID NO: 780; Antibody Heavy Chain No:62663 germ=IGHV1-2*02 seqid1=47.9 seqid3=45.4 thrd1=0.161 thrd3=0.166 divg=0.182 Nucleic acid sequence=SEQ ID NO: 81 Amino acid sequence=SEQ ID NO: 781; Antibody Heavy Chain No:19531 germ=IGHV1-2*02 seqid1=53.7 seqid3=49.2 thrd1=0.147 thrd3=0.094 divg=0.182 Nucleic acid sequence=SEQ ID NO: 82 Amino acid sequence=SEQ ID NO: 782; Antibody Heavy Chain No:18715 germ=IGHV1-2*02 seqid1=46.3 seqid3=41.5 thrd1=0.257 thrd3=0.267 divg=0.182 Nucleic acid sequence=SEQ ID NO: 83 Amino acid sequence=SEQ ID NO: 783; Antibody Heavy Chain No:13817 germ=IGHV1-2*02 seqid1=53.7 seqid3=49.2 thrd1=0.147 thrd3=0.094 divg=0.179 Nucleic acid sequence=SEQ ID NO: 84 Amino acid sequence=SEQ ID NO: 784; Antibody Heavy Chain No:53390 germ=IGHV1-2*02 seqid1=45.5 seqid3=43.8 thrd1=0.177 thrd3=0.148 divg=0.179 Nucleic acid sequence=SEQ ID NO: 85 Amino acid sequence=SEQ ID NO: 785; Antibody Heavy Chain No:6665 germ=IGHV1-2*02 seqid1=46.3 seqid3=44.6 thrd1=0.178 thrd3=0.150 divg=0.179 Nucleic acid sequence=SEQ ID NO: 86 Amino acid sequence=SEQ ID NO: 786; Antibody Heavy Chain No:19618 germ=IGHV1-2*02 seqid1=49.6 seqid3=46.2 thrd1=0.192 thrd3=0.147 divg=0.179 Nucleic acid sequence=SEQ ID NO: 87 Amino acid sequence=SEQ ID NO: 787; Antibody Heavy Chain No:55471 germ=IGHV1-2*02 seqid1=47.9 seqid3=43.8 thrd1=0.204 thrd3=0.208 divg=0.179 Nucleic acid sequence=SEQ ID NO: 88 Amino acid sequence=SEQ ID NO: 788; Antibody Heavy Chain No:57053 germ=IGHV1-2*02 seqid1=49.6 seqid3=46.2 thrd1=0.180 thrd3=0.152 divg=0.176 Nucleic acid sequence=SEQ ID NO: 89 Amino acid sequence=SEQ ID NO: 789; Antibody Heavy Chain No:43247 germ=IGHV1-2*02 seqid1=52.9 seqid3=48.5 thrd1=0.170 thrd3=0.141 divg=0.176 Nucleic acid sequence=SEQ ID NO: 90 Amino acid sequence=SEQ ID NO: 790; Antibody Heavy Chain No:79236 germ=IGHV1-2*02 seqid1=52.9 seqid3=48.5 thrd1=0.173 thrd3=0.145 divg=0.176 Nucleic acid sequence=SEQ ID NO: 91 Amino acid sequence=SEQ ID NO: 791; Antibody Heavy Chain No:72343 germ=IGHV1-2*02 seqid1=52.9 seqid3=48.5 thrd1=0.168 thrd3=0.141 divg=0.176 Nucleic acid sequence=SEQ ID NO: 92 Amino acid sequence=SEQ ID NO: 792; Antibody Heavy Chain No:100843 germ=IGHV1-2*02 seqid1=49.6 seqid3=45.4 thrd1=0.244 thrd3=0.254 divg=0.176 Nucleic acid sequence=SEQ ID NO: 93 Amino acid sequence=SEQ ID NO: 793; Antibody Heavy Chain No:26236 germ=IGHV1-2*02 seqid1=49.6 seqid3=46.2 thrd1=0.193 thrd3=0.174 divg=0.176 Nucleic acid sequence=SEQ ID NO: 94 Amino acid sequence=SEQ ID NO: 794; Antibody Heavy Chain No:77123 germ=IGHV1-2*02 seqid1=49.6 seqid3=46.2 thrd1=0.190 thrd3=0.176 divg=0.176 Nucleic acid sequence=SEQ ID NO: 95 Amino acid sequence=SEQ ID NO: 795; Antibody Heavy Chain No:59418 germ=IGHV1-2*02 seqid1=49.6 seqid3=46.2 thrd1=0.190 thrd3=0.176 divg=0.176 Nucleic acid sequence=SEQ ID NO: 96 Amino acid sequence=SEQ ID NO: 796; Antibody Heavy Chain No:10050 germ=IGHV1-2*02 seqid1=53.7 seqid3=49.2 thrd1=0.170 thrd3=0.142 divg=0.172 Nucleic acid sequence=SEQ ID NO: 97 Amino acid sequence=SEQ ID NO: 797; Antibody Heavy Chain No:68011 germ=IGHV1-2*02 seqid1=49.6 seqid3=46.2 thrd1=0.191 thrd3=0.172 divg=0.172 Nucleic acid sequence=SEQ ID NO: 98 Amino acid sequence=SEQ ID NO: 798; Antibody Heavy Chain No:72256 germ=IGHV1-2*02 seqid1=39.7 seqid3=36.2 thrd1=0.275 thrd3=0.254 divg=0.172 Nucleic acid sequence=SEQ ID NO: 99 Amino acid sequence=SEQ ID NO: 799; Antibody Heavy Chain No:42369 germ=IGHV1-2*02 seqid1=39.7 seqid3=38.5 thrd1=0.276 thrd3=0.269 divg=0.172 Nucleic acid sequence=SEQ ID NO: 100 Amino acid sequence=SEQ ID NO: 800; Antibody Heavy Chain No:82140 germ=IGHV1-2*02 seqid1=53.7 seqid3=49.2 thrd1=0.147 thrd3=0.094 divg=0.172 Nucleic acid sequence=SEQ ID NO: 101 Amino acid sequence=SEQ ID NO: 801; Antibody Heavy Chain No:6646 germ=IGHV1-2*02 seqid1=53.7 seqid3=49.2 thrd1=0.147 thrd3=0.094 divg=0.172 Nucleic acid sequence=SEQ ID NO: 102 Amino acid sequence=SEQ ID NO: 802; Antibody Heavy Chain No:62367 germ=IGHV1-2*02 seqid1=49.6 seqid3=46.2 thrd1=0.191 thrd3=0.172 divg=0.172 Nucleic acid sequence=SEQ ID NO: 103 Amino acid sequence=SEQ ID NO: 803; Antibody Heavy Chain No:84652 germ=IGHV1-2*02 seqid1=51.2 seqid3=47.7 thrd1=0.217 thrd3=0.229 divg=0.172 Nucleic acid sequence=SEQ ID NO: 104 Amino acid sequence=SEQ ID NO: 804; Antibody Heavy Chain No:109302 germ=IGHV1-2*02 seqid1=43.8 seqid3=41.5 thrd1=0.257 thrd3=0.241 divg=0.172 Nucleic acid sequence=SEQ ID NO: 105 Amino acid sequence=SEQ ID NO: 805; Antibody Heavy Chain No:56047 germ=IGHV1-2*02 seqid1=49.6 seqid3=46.2 thrd1=0.190 thrd3=0.176 divg=0.172 Nucleic acid sequence=SEQ ID NO: 106 Amino acid sequence=SEQ ID NO: 806; Antibody Heavy Chain No:8045 germ=IGHV1-2*02 seqid1=52.9 seqid3=48.5 thrd1=0.155 thrd3=0.100 divg=0.172 Nucleic acid sequence=SEQ ID NO: 107 Amino acid sequence=SEQ ID NO: 807; Antibody Heavy Chain No:103312 germ=IGHV1-2*02 seqid1=49.6 seqid3=46.2 thrd1=0.191 thrd3=0.172 divg=0.172 Nucleic acid sequence=SEQ ID NO: 108 Amino acid sequence=SEQ ID NO: 808; Antibody Heavy Chain No:16454 germ=IGHV1-2*02 seqid1=53.7 seqid3=49.2 thrd1=0.170 thrd3=0.142 divg=0.172 Nucleic acid sequence=SEQ ID NO: 109 Amino acid sequence=SEQ ID NO: 809; Antibody Heavy Chain No:106554 germ=IGHV1-2*02 seqid1=49.6 seqid3=46.2 thrd1=0.147 thrd3=0.095 divg=0.172 Nucleic acid sequence=SEQ ID NO: 110 Amino acid sequence=SEQ ID NO: 810; Antibody Heavy Chain No:30765 germ=IGHV1-2*02 seqid1=53.7 seqid3=49.2 thrd1=0.147 thrd3=0.094 divg=0.172 Nucleic acid sequence=SEQ ID NO: 111 Amino acid sequence=SEQ ID NO: 811; Antibody Heavy Chain No:120328 germ=IGHV1-2*02 seqid1=49.6 seqid3=46.2 thrd1=0.169 thrd3=0.099 divg=0.172 Nucleic acid sequence=SEQ ID NO: 112 Amino acid sequence=SEQ ID NO: 812; Antibody Heavy Chain No:71818 germ=IGHV1-2*02 seqid1=51.2 seqid3=46.9 thrd1=0.170 thrd3=0.142 divg=0.172 Nucleic acid sequence=SEQ ID NO: 113 Amino acid sequence=SEQ ID NO: 813; Antibody Heavy Chain No:75349 germ=IGHV1-2*02 seqid1=49.6 seqid3=46.2 thrd1=0.173 thrd3=0.147 divg=0.172 Nucleic acid sequence=SEQ ID NO: 114 Amino acid sequence=SEQ ID NO: 814; Antibody Heavy Chain No:84800 germ=IGHV1-2*02 seqid1=53.7 seqid3=49.2 thrd1=0.147 thrd3=0.094 divg=0.172 Nucleic acid sequence=SEQ ID NO: 115 Amino acid sequence=SEQ ID NO: 815; Antibody Heavy Chain No:30534 germ=IGHV1-2*02 seqid1=52.1 seqid3=47.7 thrd1=0.277 thrd3=0.171 divg=0.172 Nucleic acid sequence=SEQ ID NO: 116 Amino acid sequence=SEQ ID NO: 816; Antibody Heavy Chain No:116747 germ=IGHV1-2*02 seqid1=49.6 seqid3=46.2 thrd1=0.190 thrd3=0.176 divg=0.172 Nucleic acid sequence=SEQ ID NO: 117 Amino acid sequence=SEQ ID NO: 817; Antibody Heavy Chain No:59966 germ=IGHV1-2*02 seqid1=39.7 seqid3=34.6 thrd1=0.310 thrd3=0.192 divg=0.172 Nucleic acid sequence=SEQ ID NO: 118 Amino acid sequence=SEQ ID NO: 818; Antibody Heavy Chain No:55155 germ=IGHV1-2*02 seqid1=49.6 seqid3=46.2 thrd1=0.191 thrd3=0.172 divg=0.172 Nucleic acid sequence=SEQ ID NO: 119 Amino acid sequence=SEQ ID NO: 819; Antibody Heavy Chain No:44011 germ=IGHV1-2*02 seqid1=52.9 seqid3=48.5 thrd1=0.170 thrd3=0.142 divg=0.172 Nucleic acid sequence=SEQ ID NO: 120 Amino acid sequence=SEQ ID NO: 820; Antibody Heavy Chain No:52929 germ=IGHV1-2*02 seqid1=48.8 seqid3=45.4 thrd1=0.194 thrd3=0.163 divg=0.172 Nucleic acid sequence=SEQ ID NO: 121 Amino acid sequence=SEQ ID NO: 821; Antibody Heavy Chain No:23585 germ=IGHV1-2*02 seqid1=53.7 seqid3=49.2 thrd1=0.170 thrd3=0.142 divg=0.169 Nucleic acid sequence=SEQ ID NO: 122 Amino acid sequence=SEQ ID NO: 822; Antibody Heavy Chain No:18356 germ=IGHV1-2*02 seqid1=49.6 seqid3=46.2 thrd1=0.177 thrd3=0.149 divg=0.169 Nucleic acid sequence=SEQ ID NO: 123 Amino acid sequence=SEQ ID NO: 823; Antibody Heavy Chain No:47548 germ=IGHV1-2*02 seqid1=49.6 seqid3=46.2 thrd1=0.190 thrd3=0.176 divg=0.169 Nucleic acid sequence=SEQ ID NO: 124 Amino acid sequence=SEQ ID NO: 824; Antibody Heavy Chain No:16445 germ=IGHV1-2*02 seqid1=48.8 seqid3=46.2 thrd1=0.178 thrd3=0.152 divg=0.169 Nucleic acid sequence=SEQ ID NO: 125 Amino acid sequence=SEQ ID NO: 825; Antibody Heavy Chain No:54787 germ=IGHV1-2*02 seqid1=49.6 seqid3=46.2 thrd1=0.173 thrd3=0.147 divg=0.169 Nucleic acid sequence=SEQ ID NO: 126 Amino acid sequence=SEQ ID NO: 826; Antibody Heavy Chain No:54832 germ=IGHV1-2*02 seqid1=40.5 seqid3=38.5 thrd1=0.217 thrd3=0.222 divg=0.169 Nucleic acid sequence=SEQ ID NO: 127 Amino acid sequence=SEQ ID NO: 827; Antibody Heavy Chain No:113458 germ=IGHV1-2*02 seqid1=53.7 seqid3=49.2 thrd1=0.147 thrd3=0.094 divg=0.169 Nucleic acid sequence=SEQ ID NO: 128 Amino acid sequence=SEQ ID NO: 828; Antibody Heavy Chain No:73745 germ=IGHV1-2*02 seqid1=53.7 seqid3=49.2 thrd1=0.147 thrd3=0.094 divg=0.169 Nucleic acid sequence=SEQ ID NO: 129 Amino acid sequence=SEQ ID NO: 829; Antibody Heavy Chain No:63091 germ=IGHV1-2*02 seqid1=33.9 seqid3=30.8 thrd1=0.239 thrd3=0.246 divg=0.169 Nucleic acid sequence=SEQ ID NO: 130 Amino acid sequence=SEQ ID NO: 830; Antibody Heavy Chain No:55725 germ=IGHV1-2*02 seqid1=49.6 seqid3=46.2 thrd1=0.191 thrd3=0.172 divg=0.169 Nucleic acid sequence=SEQ ID NO: 131 Amino acid sequence=SEQ ID NO: 831; Antibody Heavy Chain No:107427 germ=IGHV1-2*02 seqid1=49.6 seqid3=46.2 thrd1=0.190 thrd3=0.176 divg=0.169 Nucleic acid sequence=SEQ ID NO: 132 Amino acid sequence=SEQ ID NO: 832; Antibody Heavy Chain No:112250 germ=IGHV1-2*02 seqid1=53.7 seqid3=49.2 thrd1=0.170 thrd3=0.142 divg=0.169 Nucleic acid sequence=SEQ ID NO: 133 Amino acid sequence=SEQ ID NO: 833; Antibody Heavy Chain No:86179 germ=IGHV1-2*02 seqid1=49.6 seqid3=46.2 thrd1=0.190 thrd3=0.176 divg=0.169 Nucleic acid sequence=SEQ ID NO: 134 Amino acid sequence=SEQ ID NO: 834; Antibody Heavy Chain No:111621 germ=IGHV1-2*02 seqid1=49.6 seqid3=46.2 thrd1=0.172 thrd3=0.149 divg=0.169 Nucleic acid sequence=SEQ ID NO: 135 Amino acid sequence=SEQ ID NO: 835; Antibody Heavy Chain No:18139 germ=IGHV1-2*02 seqid1=53.7 seqid3=49.2 thrd1=0.170 thrd3=0.142 divg=0.169 Nucleic acid sequence=SEQ ID NO: 136 Amino acid sequence=SEQ ID NO: 836; Antibody Heavy Chain No:56200 germ=IGHV1-2*02 seqid1=52.9 seqid3=50.8 thrd1=0.150 thrd3=0.104 divg=0.166 Nucleic acid sequence=SEQ ID NO: 137 Amino acid sequence=SEQ ID NO: 837; Antibody Heavy Chain No:75470 germ=IGHV1-2*02 seqid1=52.9 seqid3=50.8 thrd1=0.150 thrd3=0.104 divg=0.166 Nucleic acid sequence=SEQ ID NO: 138 Amino acid sequence=SEQ ID NO: 838; Antibody Heavy Chain No:48168 germ=IGHV1-2*02 seqid1=47.9 seqid3=44.6 thrd1=0.155 thrd3=0.191 divg=0.166 Nucleic acid sequence=SEQ ID NO: 139 Amino acid sequence=SEQ ID NO: 839; Antibody Heavy Chain No:78596 germ=IGHV1-2*02 seqid1=51.2 seqid3=50.0 thrd1=0.194 thrd3=0.122 divg=0.166 Nucleic acid sequence=SEQ ID NO: 140 Amino acid sequence=SEQ ID NO: 840; Antibody Heavy Chain No:69129 germ=IGHV1-2*02 seqid1=52.9 seqid3=50.8 thrd1=0.150 thrd3=0.104 divg=0.166 Nucleic acid sequence=SEQ ID NO: 141 Amino acid sequence=SEQ ID NO: 841; Antibody Heavy Chain No:107212 germ=IGHV1-2*02 seqid1=47.9 seqid3=44.6 thrd1=0.151 thrd3=0.189 divg=0.162 Nucleic acid sequence=SEQ ID NO: 142 Amino acid sequence=SEQ ID NO: 842; Antibody Heavy Chain No:71549 germ=IGHV1-2*02 seqid1=47.9 seqid3=44.6 thrd1=0.151 thrd3=0.189 divg=0.162 Nucleic acid sequence=SEQ ID NO: 143 Amino acid sequence=SEQ ID NO: 843; Antibody Heavy Chain No:19124 germ=IGHV1-2*02 seqid1=45.5 seqid3=42.3 thrd1=0.153 thrd3=0.196 divg=0.162 Nucleic acid sequence=SEQ ID NO: 144 Amino acid sequence=SEQ ID NO: 844; Antibody Heavy Chain No:100576 germ=IGHV1-2*02 seqid1=52.9 seqid3=50.8 thrd1=0.190 thrd3=0.118 divg=0.162 Nucleic acid sequence=SEQ ID NO: 145 Amino acid sequence=SEQ ID NO: 845; Antibody Heavy Chain No:14535 germ=IGHV1-2*02 seqid1=47.9 seqid3=44.6 thrd1=0.151 thrd3=0.189 divg=0.162 Nucleic acid sequence=SEQ ID NO: 146 Amino acid sequence=SEQ ID NO: 846; Antibody Heavy Chain No:11019 germ=IGHV1-2*02 seqid1=49.6 seqid3=44.6 thrd1=0.152 thrd3=0.187 divg=0.162 Nucleic acid sequence=SEQ ID NO: 147 Amino acid sequence=SEQ ID NO: 847; Antibody Heavy Chain No:123937 germ=IGHV1-2*02 seqid1=47.9 seqid3=45.4 thrd1=0.218 thrd3=0.219 divg=0.159 Nucleic acid sequence=SEQ ID NO: 148 Amino acid sequence=SEQ ID NO: 848; Antibody Heavy Chain No:36310 germ=IGHV1-2*02 seqid1=51.2 seqid3=46.9 thrd1=0.161 thrd3=0.236 divg=0.159 Nucleic acid sequence=SEQ ID NO: 149 Amino acid sequence=SEQ ID NO: 849; Antibody Heavy Chain No:32707 germ=IGHV1-2*02 seqid1=47.9 seqid3=46.2 thrd1=0.214 thrd3=0.187 divg=0.159 Nucleic acid sequence=SEQ ID NO: 150 Amino acid sequence=SEQ ID NO: 850; Antibody Heavy Chain No:87704 germ=IGHV1-2*02 seqid1=47.1 seqid3=43.8 thrd1=0.219 thrd3=0.147 divg=0.159 Nucleic acid sequence=SEQ ID NO: 151 Amino acid sequence=SEQ ID NO: 851; Antibody Heavy Chain No:19098 germ=IGHV1-2*02 seqid1=47.9 seqid3=44.6 thrd1=0.151 thrd3=0.189 divg=0.159 Nucleic acid sequence=SEQ ID NO: 152 Amino acid sequence=SEQ ID NO: 852; Antibody Heavy Chain No:99181 germ=IGHV1-2*02 seqid1=38.8 seqid3=37.7 thrd1=0.211 thrd3=0.213 divg=0.155 Nucleic acid sequence=SEQ ID NO: 153 Amino acid sequence=SEQ ID NO: 853; Antibody Heavy Chain No:40537 germ=IGHV1-2*02 seqid1=47.9 seqid3=46.2 thrd1=0.212 thrd3=0.186 divg=0.155 Nucleic acid sequence=SEQ ID NO: 154 Amino acid sequence=SEQ ID NO: 854; Antibody Heavy Chain No:36907 germ=IGHV1-2*02 seqid1=49.6 seqid3=49.2 thrd1=0.150 thrd3=0.149 divg=0.155 Nucleic acid sequence=SEQ ID NO: 155 Amino acid sequence=SEQ ID NO: 855; Antibody Heavy Chain No:29608 germ=IGHV1-2*02 seqid1=47.9 seqid3=46.2 thrd1=0.149 thrd3=0.205 divg=0.155 Nucleic acid sequence=SEQ ID NO: 156 Amino acid sequence=SEQ ID NO: 856; Antibody Heavy Chain No:113080 germ=IGHV1-2*02 seqid1=48.8 seqid3=48.5 thrd1=0.163 thrd3=0.167 divg=0.155 Nucleic acid sequence=SEQ ID NO: 157 Amino acid sequence=SEQ ID NO: 857; Antibody Heavy Chain No:71038 germ=IGHV1-2*02 seqid1=47.9 seqid3=46.2 thrd1=0.212 thrd3=0.186 divg=0.155 Nucleic acid sequence=SEQ ID NO: 158 Amino acid sequence=SEQ ID NO: 858; Antibody Heavy Chain No:6143 germ=IGHV1-2*02 seqid1=52.9 seqid3=48.5 thrd1=0.094 thrd3=0.134 divg=0.152 Nucleic acid sequence=SEQ ID NO: 159 Amino acid sequence=SEQ ID NO: 859; Antibody Heavy Chain No:43158 germ=IGHV1-2*02 seqid1=47.9 seqid3=46.2 thrd1=0.149 thrd3=0.205 divg=0.152 Nucleic acid sequence=SEQ ID NO: 160 Amino acid sequence=SEQ ID NO: 860; Antibody Heavy Chain No:15966 germ=IGHV1-2*02 seqid1=52.9 seqid3=45.4 thrd1=0.196 thrd3=0.118 divg=0.152 Nucleic acid sequence=SEQ ID NO: 161 Amino acid sequence=SEQ ID NO: 861; Antibody Heavy Chain No:34203 germ=IGHV1-2*02 seqid1=49.6 seqid3=45.4 thrd1=0.150 thrd3=0.184 divg=0.152 Nucleic acid sequence=SEQ ID NO: 162 Amino acid sequence=SEQ ID NO: 862; Antibody Heavy Chain No:88799 germ=IGHV1-2*02 seqid1=46.3 seqid3=42.3 thrd1=0.168 thrd3=0.213 divg=0.152 Nucleic acid sequence=SEQ ID NO: 163 Amino acid sequence=SEQ ID NO: 863; Antibody Heavy Chain No:2164 germ=IGHV1-2*02 seqid1=51.2 seqid3=50.0 thrd1=0.150 thrd3=0.150 divg=0.152 Nucleic acid sequence=SEQ ID NO: 164 Amino acid sequence=SEQ ID NO: 864; Antibody Heavy Chain No:179552 germ=IGHV1-2*02 seqid1=43.8 seqid3=45.4 thrd1=0.216 thrd3=0.125 divg=0.149 Nucleic acid sequence=SEQ ID NO: 165 Amino acid sequence=SEQ ID NO: 865; Antibody Heavy Chain No:4734 germ=IGHV1-2*02 seqid1=44.6 seqid3=48.5 thrd1=0.185 thrd3=0.156 divg=0.145 Nucleic acid sequence=SEQ ID NO: 166 Amino acid sequence=SEQ ID NO: 866; Antibody Heavy Chain No:17242 germ=IGHV1-2*02 seqid1=47.9 seqid3=46.2 thrd1=0.144 thrd3=0.143 divg=0.145 Nucleic acid sequence=SEQ ID NO: 167 Amino acid sequence=SEQ ID NO: 867; Antibody Heavy Chain No:17884 germ=IGHV1-2*02 seqid1=44.6 seqid3=48.5 thrd1=0.186 thrd3=0.158 divg=0.142 Nucleic acid sequence=SEQ ID NO: 168 Amino acid sequence=SEQ ID NO: 868; Antibody Heavy Chain No:32382 germ=IGHV1-2*02 seqid1=49.6 seqid3=47.7 thrd1=0.144 thrd3=0.143 divg=0.142 Nucleic acid sequence=SEQ ID NO: 169 Amino acid sequence=SEQ ID NO: 869; Antibody Heavy Chain No:41962 germ=IGHV1-2*02 seqid1=49.6 seqid3=47.7 thrd1=0.144 thrd3=0.143 divg=0.142 Nucleic acid sequence=SEQ ID NO: 170 Amino acid sequence=SEQ ID NO: 870; Antibody Heavy Chain No:59875 germ=IGHV1-2*02 seqid1=49.6 seqid3=47.7 thrd1=0.144 thrd3=0.143 divg=0.142 Nucleic acid sequence=SEQ ID NO: 171 Amino acid sequence=SEQ ID NO: 871; Antibody Heavy Chain No:33133 germ=IGHV1-2*02 seqid1=49.6 seqid3=49.2 thrd1=0.163 thrd3=0.158 divg=0.142 Nucleic acid sequence=SEQ ID NO: 172 Amino acid sequence=SEQ ID NO: 872; Antibody Heavy Chain No:82539 germ=IGHV1-2*02 seqid1=53.7 seqid3=48.5 thrd1=0.173 thrd3=0.204 divg=0.142 Nucleic acid sequence=SEQ ID NO: 173 Amino acid sequence=SEQ ID NO: 873; Antibody Heavy Chain No:43232 germ=IGHV1-2*02 seqid1=49.6 seqid3=47.7 thrd1=0.144 thrd3=0.143 divg=0.142 Nucleic acid sequence=SEQ ID NO: 174 Amino acid sequence=SEQ ID NO: 874; Antibody Heavy Chain No:49896 germ=IGHV1-2*02 seqid1=43.0 seqid3=43.8 thrd1=0.240 thrd3=0.155 divg=0.142 Nucleic acid sequence=SEQ ID NO: 175 Amino acid sequence=SEQ ID NO: 875; Antibody Heavy Chain No:13144 germ=IGHV1-2*02 seqid1=53.7 seqid3=48.5 thrd1=0.208 thrd3=0.114 divg=0.139 Nucleic acid sequence=SEQ ID NO: 176 Amino acid sequence=SEQ ID NO: 876; Antibody Heavy Chain No:94912 germ=IGHV1-2*02 seqid1=52.1 seqid3=49.2 thrd1=0.163 thrd3=0.210 divg=0.139 Nucleic acid sequence=SEQ ID NO: 177 Amino acid sequence=SEQ ID NO: 877; Antibody Heavy Chain No:95649 germ=IGHV1-2*02 seqid1=51.2 seqid3=45.4 thrd1=0.106 thrd3=0.141 divg=0.139 Nucleic acid sequence=SEQ ID NO: 178 Amino acid sequence=SEQ ID NO: 878; Antibody Heavy Chain No:5273 germ=IGHV1-2*02 seqid1=50.4 seqid3=50.0 thrd1=0.161 thrd3=0.156 divg=0.139 Nucleic acid sequence=SEQ ID NO: 179 Amino acid sequence=SEQ ID NO: 879; Antibody Heavy Chain No:79693 germ=IGHV1-2*02 seqid1=52.1 seqid3=46.2 thrd1=0.092 thrd3=0.132 divg=0.139 Nucleic acid sequence=SEQ ID NO: 180 Amino acid sequence=SEQ ID NO: 880; Antibody Heavy Chain No:80554 germ=IGHV1-2*02 seqid1=51.2 seqid3=48.5 thrd1=0.161 thrd3=0.211 divg=0.139 Nucleic acid sequence=SEQ ID NO: 181 Amino acid sequence=SEQ ID NO: 881; Antibody Heavy Chain No:119108 germ=IGHV1-2*02 seqid1=47.1 seqid3=45.4 thrd1=0.163 thrd3=0.222 divg=0.139 Nucleic acid sequence=SEQ ID NO: 182 Amino acid sequence=SEQ ID NO: 882; Antibody Heavy Chain No:29950 germ=IGHV1-2*02 seqid1=50.4 seqid3=50.0 thrd1=0.161 thrd3=0.156 divg=0.139 Nucleic acid sequence=SEQ ID NO: 183 Amino acid sequence=SEQ ID NO: 883; Antibody Heavy Chain No:39089 germ=IGHV1-2*02 seqid1=50.4 seqid3=50.0 thrd1=0.161 thrd3=0.156 divg=0.139 Nucleic acid sequence=SEQ ID NO: 184 Amino acid sequence=SEQ ID NO: 884; Antibody Heavy Chain No:40410 germ=IGHV1-2*02 seqid1=50.4 seqid3=50.0 thrd1=0.160 thrd3=0.155 divg=0.139 Nucleic acid sequence=SEQ ID NO: 185 Amino acid sequence=SEQ ID NO: 885; Antibody Heavy Chain No:14930 germ=IGHV1-2*02 seqid1=51.2 seqid3=48.5 thrd1=0.161 thrd3=0.211 divg=0.139 Nucleic acid sequence=SEQ ID NO: 186 Amino acid sequence=SEQ ID NO: 886; Antibody Heavy Chain No:55973 germ=IGHV1-2*02 seqid1=49.6 seqid3=48.5 thrd1=0.170 thrd3=0.115 divg=0.139 Nucleic acid sequence=SEQ ID NO: 187 Amino acid sequence=SEQ ID NO: 887; Antibody Heavy Chain No:4040 germ=IGHV1-2*02 seqid1=49.6 seqid3=49.2 thrd1=0.163 thrd3=0.159 divg=0.139 Nucleic acid sequence=SEQ ID NO: 188 Amino acid sequence=SEQ ID NO: 888; Antibody Heavy Chain No:52215 germ=IGHV1-2*02 seqid1=44.6 seqid3=44.6 thrd1=0.189 thrd3=0.284 divg=0.139 Nucleic acid sequence=SEQ ID NO: 189 Amino acid sequence=SEQ ID NO: 889; Antibody Heavy Chain No:65622 germ=IGHV1-2*02 seqid1=57.9 seqid3=51.5 thrd1=0.228 thrd3=0.174 divg=0.139 Nucleic acid sequence=SEQ ID NO: 190 Amino acid sequence=SEQ ID NO: 890; Antibody Heavy Chain No:144394 germ=IGHV1-2*02 seqid1=50.4 seqid3=48.5 thrd1=0.148 thrd3=0.151 divg=0.139 Nucleic acid sequence=SEQ ID NO: 191 Amino acid sequence=SEQ ID NO: 891; Antibody Heavy Chain No:10658 germ=IGHV1-2*02 seqid1=50.4 seqid3=50.0 thrd1=0.161 thrd3=0.156 divg=0.139 Nucleic acid sequence=SEQ ID NO: 192 Amino acid sequence=SEQ ID NO: 892; Antibody Heavy Chain No:3811 germ=IGHV1-2*02 seqid1=50.4 seqid3=50.0 thrd1=0.161 thrd3=0.156 divg=0.139 Nucleic acid sequence=SEQ ID NO: 193 Amino acid sequence=SEQ ID NO: 893; Antibody Heavy Chain No:48101 germ=IGHV1-2*02 seqid1=49.6 seqid3=50.0 thrd1=0.162 thrd3=0.157 divg=0.139 Nucleic acid sequence=SEQ ID NO: 194 Amino acid sequence=SEQ ID NO: 894; Antibody Heavy Chain No:15636 germ=IGHV1-2*02 seqid1=50.4 seqid3=50.0 thrd1=0.161 thrd3=0.156 divg=0.139 Nucleic acid sequence=SEQ ID NO: 195 Amino acid sequence=SEQ ID NO: 895; Antibody Heavy Chain No:26505 germ=IGHV1-2*02 seqid1=48.8 seqid3=43.8 thrd1=0.283 thrd3=0.157 divg=0.139 Nucleic acid sequence=SEQ ID NO: 196 Amino acid sequence=SEQ ID NO: 896; Antibody Heavy Chain No:84089 germ=IGHV1-2*02 seqid1=51.2 seqid3=50.0 thrd1=0.159 thrd3=0.154 divg=0.135 Nucleic acid sequence=SEQ ID NO: 197 Amino acid sequence=SEQ ID NO: 897; Antibody Heavy Chain No:104154 germ=IGHV1-2*02 seqid1=50.4 seqid3=50.0 thrd1=0.161 thrd3=0.156 divg=0.135 Nucleic acid sequence=SEQ ID NO: 198 Amino acid sequence=SEQ ID NO: 898; Antibody Heavy Chain No:23977 germ=IGHV1-2*02 seqid1=50.4 seqid3=50.0 thrd1=0.159 thrd3=0.155 divg=0.135 Nucleic acid sequence=SEQ ID NO: 199 Amino acid sequence=SEQ ID NO: 899; Antibody Heavy Chain No:167681 germ=IGHV1-2*02 seqid1=41.3 seqid3=40.0 thrd1=0.234 thrd3=0.259 divg=0.135 Nucleic acid sequence=SEQ ID NO: 200 Amino acid sequence=SEQ ID NO: 900; Antibody Heavy Chain No:17288 germ=IGHV1-2*02 seqid1=53.7 seqid3=47.7 thrd1=0.093 thrd3=0.133 divg=0.135 Nucleic acid sequence=SEQ ID NO: 201 Amino acid sequence=SEQ ID NO: 901; Antibody Heavy Chain No:33637 germ=IGHV1-2*02 seqid1=52.9 seqid3=47.7 thrd1=0.094 thrd3=0.134 divg=0.135 Nucleic acid sequence=SEQ ID NO: 202 Amino acid sequence=SEQ ID NO: 902; Antibody Heavy Chain No:110259 germ=IGHV1-2*02 seqid1=48.8 seqid3=50.0 thrd1=0.161 thrd3=0.158 divg=0.135 Nucleic acid sequence=SEQ ID NO: 203 Amino acid sequence=SEQ ID NO: 903; Antibody Heavy Chain No:11461 germ=IGHV1-2*02 seqid1=49.6 seqid3=49.2 thrd1=0.164 thrd3=0.160 divg=0.135 Nucleic acid sequence=SEQ ID NO: 204 Amino acid sequence=SEQ ID NO: 904; Antibody Heavy Chain No:57309 germ=IGHV1-2*02 seqid1=50.4 seqid3=50.0 thrd1=0.164 thrd3=0.159 divg=0.135 Nucleic acid sequence=SEQ ID NO: 205 Amino acid sequence=SEQ ID NO: 905; Antibody Heavy Chain No:28613 germ=IGHV1-2*02 seqid1=47.1 seqid3=46.9 thrd1=0.180 thrd3=0.242 divg=0.135 Nucleic acid sequence=SEQ ID NO: 206 Amino acid sequence=SEQ ID NO: 906; Antibody Heavy Chain No:80786 germ=IGHV1-2*02 seqid1=47.1 seqid3=44.6 thrd1=0.159 thrd3=0.152 divg=0.135 Nucleic acid sequence=SEQ ID NO: 207 Amino acid sequence=SEQ ID NO: 907; Antibody Heavy Chain No:34770 germ=IGHV1-2*02 seqid1=50.4 seqid3=50.0 thrd1=0.162 thrd3=0.158 divg=0.135 Nucleic acid sequence=SEQ ID NO: 208 Amino acid sequence=SEQ ID NO: 908; Antibody Heavy Chain No:58396 germ=IGHV1-2*02 seqid1=49.6 seqid3=50.0 thrd1=0.159 thrd3=0.155 divg=0.135 Nucleic acid sequence=SEQ ID NO: 209 Amino acid sequence=SEQ ID NO: 909; Antibody Heavy Chain No:150271 germ=IGHV1-2*02 seqid1=39.7 seqid3=41.5 thrd1=0.310 thrd3=0.356 divg=0.135 Nucleic acid sequence=SEQ ID NO: 210 Amino acid sequence=SEQ ID NO: 910; Antibody Heavy Chain No:44015 germ=IGHV1-2*02 seqid1=50.4 seqid3=50.0 thrd1=0.160 thrd3=0.157 divg=0.135 Nucleic acid sequence=SEQ ID NO: 211 Amino acid sequence=SEQ ID NO: 911; Antibody Heavy Chain No:64391 germ=IGHV1-2*02 seqid1=45.5 seqid3=45.4 thrd1=0.228 thrd3=0.145 divg=0.135 Nucleic acid sequence=SEQ ID NO: 212 Amino acid sequence=SEQ ID NO: 912; Antibody Heavy Chain No:25120 germ=IGHV1-2*02 seqid1=49.6 seqid3=49.2 thrd1=0.161 thrd3=0.157 divg=0.135 Nucleic acid sequence=SEQ ID NO: 213 Amino acid sequence=SEQ ID NO: 913; Antibody Heavy Chain No:10614 germ=IGHV1-2*02 seqid1=50.4 seqid3=50.8 thrd1=0.165 thrd3=0.150 divg=0.135 Nucleic acid sequence=SEQ ID NO: 214 Amino acid sequence=SEQ ID NO: 914; Antibody Heavy Chain No:51689 germ=IGHV1-2*02 seqid1=49.6 seqid3=49.2 thrd1=0.162 thrd3=0.158 divg=0.135 Nucleic acid sequence=SEQ ID NO: 215 Amino acid sequence=SEQ ID NO: 915; Antibody Heavy Chain No:63801 germ=IGHV1-2*02 seqid1=53.7 seqid3=50.0 thrd1=0.153 thrd3=0.200 divg=0.135 Nucleic acid sequence=SEQ ID NO: 216 Amino acid sequence=SEQ ID NO: 916; Antibody Heavy Chain No:116007 germ=IGHV1-2*02 seqid1=53.7 seqid3=47.7 thrd1=0.093 thrd3=0.133 divg=0.135 Nucleic acid sequence=SEQ ID NO: 217 Amino acid sequence=SEQ ID NO: 917; Antibody Heavy Chain No:22483 germ=IGHV1-2*02 seqid1=50.4 seqid3=50.0 thrd1=0.164 thrd3=0.159 divg=0.135 Nucleic acid sequence=SEQ ID NO: 218 Amino acid sequence=SEQ ID NO: 918; Antibody Heavy Chain No:52322 germ=IGHV1-2*02 seqid1=52.1 seqid3=46.2 thrd1=0.099 thrd3=0.141 divg=0.135 Nucleic acid sequence=SEQ ID NO: 219 Amino acid sequence=SEQ ID NO: 919; Antibody Heavy Chain No:88747 germ=IGHV1-2*02 seqid1=47.1 seqid3=46.9 thrd1=0.165 thrd3=0.160 divg=0.135 Nucleic acid sequence=SEQ ID NO: 220 Amino acid sequence=SEQ ID NO: 920; Antibody Heavy Chain No:35449 germ=IGHV1-2*02 seqid1=53.7 seqid3=47.7 thrd1=0.093 thrd3=0.135 divg=0.135 Nucleic acid sequence=SEQ ID NO: 221 Amino acid sequence=SEQ ID NO: 921; Antibody Heavy Chain No:18812 germ=IGHV1-2*02 seqid1=49.6 seqid3=49.2 thrd1=0.157 thrd3=0.153 divg=0.135 Nucleic acid sequence=SEQ ID NO: 222 Amino acid sequence=SEQ ID NO: 922; Antibody Heavy Chain No:69878 germ=IGHV1-2*02 seqid1=49.6 seqid3=50.0 thrd1=0.149 thrd3=0.121 divg=0.135 Nucleic acid sequence=SEQ ID NO: 223 Amino acid sequence=SEQ ID NO: 923; Antibody Heavy Chain No:78844 germ=IGHV1-2*02 seqid1=50.4 seqid3=47.7 thrd1=0.150 thrd3=0.143 divg=0.135 Nucleic acid sequence=SEQ ID NO: 224 Amino acid sequence=SEQ ID NO: 924; Antibody Heavy Chain No:79855 germ=IGHV1-2*02 seqid1=43.0 seqid3=43.8 thrd1=0.262 thrd3=0.267 divg=0.135 Nucleic acid sequence=SEQ ID NO: 225 Amino acid sequence=SEQ ID NO: 925; Antibody Heavy Chain No:59636 germ=IGHV1-2*02 seqid1=50.4 seqid3=50.0 thrd1=0.162 thrd3=0.158 divg=0.135 Nucleic acid sequence=SEQ ID NO: 226 Amino acid sequence=SEQ ID NO: 926; Antibody Heavy Chain No:81201 germ=IGHV1-2*02 seqid1=50.4 seqid3=50.0 thrd1=0.161 thrd3=0.157 divg=0.135 Nucleic acid sequence=SEQ ID NO: 227 Amino acid sequence=SEQ ID NO: 927; Antibody Heavy Chain No:72731 germ=IGHV1-2*02 seqid1=49.6 seqid3=50.0 thrd1=0.160 thrd3=0.155 divg=0.135 Nucleic acid sequence=SEQ ID NO: 228 Amino acid sequence=SEQ ID NO: 928; Antibody Heavy Chain No:195439 germ=IGHV1-2*02 seqid1=49.6 seqid3=45.4 thrd1=0.123 thrd3=0.107 divg=0.135 Nucleic acid sequence=SEQ ID NO: 229 Amino acid sequence=SEQ ID NO: 929; Antibody Heavy Chain No:52914 germ=IGHV1-2*02 seqid1=51.2 seqid3=50.0 thrd1=0.282 thrd3=0.176 divg=0.135 Nucleic acid sequence=SEQ ID NO: 230 Amino acid sequence=SEQ ID NO: 930; Antibody Heavy Chain No:74803 germ=IGHV1-2*02 seqid1=53.7 seqid3=47.7 thrd1=0.093 thrd3=0.133 divg=0.135 Nucleic acid sequence=SEQ ID NO: 231 Amino acid sequence=SEQ ID NO: 931; Antibody Heavy Chain No:74459 germ=IGHV1-2*02 seqid1=50.4 seqid3=50.8 thrd1=0.160 thrd3=0.155 divg=0.135 Nucleic acid sequence=SEQ ID NO: 232 Amino acid sequence=SEQ ID NO: 932; Antibody Heavy Chain No:7871 germ=IGHV1-2*02 seqid1=52.1 seqid3=47.7 thrd1=0.201 thrd3=0.127 divg=0.135 Nucleic acid sequence=SEQ ID NO: 233 Amino acid sequence=SEQ ID NO: 933; Antibody Heavy Chain No:20841 germ=IGHV1-2*02 seqid1=53.7 seqid3=47.7 thrd1=0.093 thrd3=0.133 divg=0.135 Nucleic acid sequence=SEQ ID NO: 234 Amino acid sequence=SEQ ID NO: 934; Antibody Heavy Chain No:37716 germ=IGHV1-2*02 seqid1=49.6 seqid3=49.2 thrd1=0.160 thrd3=0.156 divg=0.135 Nucleic acid sequence=SEQ ID NO: 235 Amino acid sequence=SEQ ID NO: 935; Antibody Heavy Chain No:39615 germ=IGHV1-2*02 seqid1=50.4 seqid3=47.7 thrd1=0.150 thrd3=0.143 divg=0.135 Nucleic acid sequence=SEQ ID NO: 236 Amino acid sequence=SEQ ID NO: 936; Antibody Heavy Chain No:66215 germ=IGHV1-2*02 seqid1=50.4 seqid3=50.0 thrd1=0.160 thrd3=0.155 divg=0.135 Nucleic acid sequence=SEQ ID NO: 237 Amino acid sequence=SEQ ID NO: 937; Antibody Heavy Chain No:82019 germ=IGHV1-2*02 seqid1=49.6 seqid3=49.2 thrd1=0.165 thrd3=0.163 divg=0.135 Nucleic acid sequence=SEQ ID NO: 238 Amino acid sequence=SEQ ID NO: 938; Antibody Heavy Chain No:21464 germ=IGHV1-2*02 seqid1=51.2 seqid3=50.0 thrd1=0.162 thrd3=0.156 divg=0.135 Nucleic acid sequence=SEQ ID NO: 239 Amino acid sequence=SEQ ID NO: 939; Antibody Heavy Chain No:105467 germ=IGHV1-2*02 seqid1=49.6 seqid3=47.7 thrd1=0.167 thrd3=0.164 divg=0.135 Nucleic acid sequence=SEQ ID NO: 240 Amino acid sequence=SEQ ID NO: 940; Antibody Heavy Chain No:60368 germ=IGHV1-2*02 seqid1=50.4 seqid3=50.0 thrd1=0.161 thrd3=0.156 divg=0.135 Nucleic acid sequence=SEQ ID NO: 241 Amino acid sequence=SEQ ID NO: 941; Antibody Heavy Chain No:113424 germ=IGHV1-2*02 seqid1=50.4 seqid3=50.0 thrd1=0.161 thrd3=0.156 divg=0.132 Nucleic acid sequence=SEQ ID NO: 242 Amino acid sequence=SEQ ID NO: 942; Antibody Heavy Chain No:87796 germ=IGHV1-2*02 seqid1=50.4 seqid3=50.0 thrd1=0.161 thrd3=0.156 divg=0.132 Nucleic acid sequence=SEQ ID NO: 243 Amino acid sequence=SEQ ID NO: 943; Antibody Heavy Chain No:107864 germ=IGHV1-2*02 seqid1=50.4 seqid3=50.0 thrd1=0.161 thrd3=0.156 divg=0.132 Nucleic acid sequence=SEQ ID NO: 244 Amino acid sequence=SEQ ID NO: 944; Antibody Heavy Chain No:128805 germ=IGHV1-2*02 seqid1=48.8 seqid3=47.7 thrd1=0.153 thrd3=0.162 divg=0.132 Nucleic acid sequence=SEQ ID NO: 245 Amino acid sequence=SEQ ID NO: 945; Antibody Heavy Chain No:38060 germ=IGHV1-2*02 seqid1=50.4 seqid3=50.0 thrd1=0.161 thrd3=0.156 divg=0.132 Nucleic acid sequence=SEQ ID NO: 246 Amino acid sequence=SEQ ID NO: 946; Antibody Heavy Chain No:97440 germ=IGHV1-2*02 seqid1=48.8 seqid3=48.5 thrd1=0.165 thrd3=0.162 divg=0.132 Nucleic acid sequence=SEQ ID NO: 247 Amino acid sequence=SEQ ID NO: 947; Antibody Heavy Chain No:66266 germ=IGHV1-2*02 seqid1=50.4 seqid3=50.0 thrd1=0.161 thrd3=0.156 divg=0.132 Nucleic acid sequence=SEQ ID NO: 248 Amino acid sequence=SEQ ID NO: 948; Antibody Heavy Chain No:39042 germ=IGHV1-2*02 seqid1=49.6 seqid3=50.0 thrd1=0.159 thrd3=0.138 divg=0.132 Nucleic acid sequence=SEQ ID NO: 249 Amino acid sequence=SEQ ID NO: 949; Antibody Heavy Chain No:94534 germ=IGHV1-2*02 seqid1=50.4 seqid3=50.0 thrd1=0.161 thrd3=0.156 divg=0.132 Nucleic acid sequence=SEQ ID NO: 250 Amino acid sequence=SEQ ID NO: 950; Antibody Heavy Chain No:94385 germ=IGHV1-2*02 seqid1=50.4 seqid3=50.0 thrd1=0.161 thrd3=0.156 divg=0.132 Nucleic acid sequence=SEQ ID NO: 251 Amino acid sequence=SEQ ID NO: 951; Antibody Heavy Chain No:76265 germ=IGHV1-2*02 seqid1=50.4 seqid3=50.0 thrd1=0.161 thrd3=0.156 divg=0.132 Nucleic acid sequence=SEQ ID NO: 252 Amino acid sequence=SEQ ID NO: 952; Antibody Heavy Chain No:22535 germ=IGHV1-2*02 seqid1=50.4 seqid3=50.0 thrd1=0.161 thrd3=0.156 divg=0.132 Nucleic acid sequence=SEQ ID NO: 253 Amino acid sequence=SEQ ID NO: 953; Antibody Heavy Chain No:85110 germ=IGHV1-2*02 seqid1=53.7 seqid3=47.7 thrd1=0.093 thrd3=0.133 divg=0.132 Nucleic acid sequence=SEQ ID NO: 254 Amino acid sequence=SEQ ID NO: 954; Antibody Heavy Chain No:168379 germ=IGHV1-2*02 seqid1=50.4 seqid3=49.2 thrd1=0.162 thrd3=0.157 divg=0.132 Nucleic acid sequence=SEQ ID NO: 255 Amino acid sequence=SEQ ID NO: 955; Antibody Heavy Chain No:112172 germ=IGHV1-2*02 seqid1=50.4 seqid3=44.6 thrd1=0.105 thrd3=0.149 divg=0.132 Nucleic acid sequence=SEQ ID NO: 256 Amino acid sequence=SEQ ID NO: 956; Antibody Heavy Chain No:47329 germ=IGHV1-2*02 seqid1=50.4 seqid3=50.0 thrd1=0.161 thrd3=0.156 divg=0.132 Nucleic acid sequence=SEQ ID NO: 257 Amino acid sequence=SEQ ID NO: 957; Antibody Heavy Chain No:38803 germ=IGHV1-2*02 seqid1=50.4 seqid3=50.0 thrd1=0.161 thrd3=0.156 divg=0.132 Nucleic acid sequence=SEQ ID NO: 258 Amino acid sequence=SEQ ID NO: 958; Antibody Heavy Chain No:42945 germ=IGHV1-2*02 seqid1=50.4 seqid3=50.0 thrd1=0.161 thrd3=0.156 divg=0.132 Nucleic acid sequence=SEQ ID NO: 259 Amino acid sequence=SEQ ID NO: 959; Antibody Heavy Chain No:55338 germ=IGHV1-2*02 seqid1=50.4 seqid3=50.0 thrd1=0.161 thrd3=0.156 divg=0.132 Nucleic acid sequence=SEQ ID NO: 260 Amino acid sequence=SEQ ID NO: 960; Antibody Heavy Chain No:53837 germ=IGHV1-2*02 seqid1=53.7 seqid3=47.7 thrd1=0.093 thrd3=0.133 divg=0.132 Nucleic acid sequence=SEQ ID NO: 261 Amino acid sequence=SEQ ID NO: 961; Antibody Heavy Chain No:73759 germ=IGHV1-2*02 seqid1=50.4 seqid3=50.0 thrd1=0.161 thrd3=0.156 divg=0.132 Nucleic acid sequence=SEQ ID NO: 262 Amino acid sequence=SEQ ID NO: 962; Antibody Heavy Chain No:131368 germ=IGHV1-2*02 seqid1=50.4 seqid3=50.0 thrd1=0.161 thrd3=0.156 divg=0.132 Nucleic acid sequence=SEQ ID NO: 263 Amino acid sequence=SEQ ID NO: 963; Antibody Heavy Chain No:80330 germ=IGHV1-2*02 seqid1=50.4 seqid3=50.0 thrd1=0.161 thrd3=0.156 divg=0.132 Nucleic acid sequence=SEQ ID NO: 264 Amino acid sequence=SEQ ID NO: 964; Antibody Heavy Chain No:52164 germ=IGHV1-2*02 seqid1=50.4 seqid3=50.0 thrd1=0.161 thrd3=0.156 divg=0.132 Nucleic acid sequence=SEQ ID NO: 265 Amino acid sequence=SEQ ID NO: 965; Antibody Heavy Chain No:52134 germ=IGHV1-2*02 seqid1=50.4 seqid3=50.0 thrd1=0.161 thrd3=0.156 divg=0.132 Nucleic acid sequence=SEQ ID NO: 266 Amino acid sequence=SEQ ID NO: 966; Antibody Heavy Chain No:53605 germ=IGHV1-2*02 seqid1=51.2 seqid3=46.9 thrd1=0.172 thrd3=0.222 divg=0.132 Nucleic acid sequence=SEQ ID NO: 267 Amino acid sequence=SEQ ID NO: 967; Antibody Heavy Chain No:129544 germ=IGHV1-2*02 seqid1=53.7 seqid3=47.7 thrd1=0.093 thrd3=0.133 divg=0.132 Nucleic acid sequence=SEQ ID NO: 268 Amino acid sequence=SEQ ID NO: 968; Antibody Heavy Chain No:28518 germ=IGHV1-2*02 seqid1=54.5 seqid3=50.0 thrd1=0.179 thrd3=0.175 divg=0.132 Nucleic acid sequence=SEQ ID NO: 269 Amino acid sequence=SEQ ID NO: 969; Antibody Heavy Chain No:38525 germ=IGHV1-2*02 seqid1=50.4 seqid3=50.0 thrd1=0.161 thrd3=0.156 divg=0.132 Nucleic acid sequence=SEQ ID NO: 270 Amino acid sequence=SEQ ID NO: 970; Antibody Heavy Chain No:88750 germ=IGHV1-2*02 seqid1=50.4 seqid3=50.0 thrd1=0.161 thrd3=0.156 divg=0.132 Nucleic acid sequence=SEQ ID NO: 271 Amino acid sequence=SEQ ID NO: 971; Antibody Heavy Chain No:26549 germ=IGHV1-2*02 seqid1=50.4 seqid3=49.2 thrd1=0.159 thrd3=0.175 divg=0.132 Nucleic acid sequence=SEQ ID NO: 272 Amino acid sequence=SEQ ID NO: 972; Antibody Heavy Chain No:7631 germ=IGHV1-2*02 seqid1=53.7 seqid3=47.7 thrd1=0.093 thrd3=0.133 divg=0.132 Nucleic acid sequence=SEQ ID NO: 273 Amino acid sequence=SEQ ID NO: 973; Antibody Heavy Chain No:130129 germ=IGHV1-2*02 seqid1=48.8 seqid3=49.2 thrd1=0.159 thrd3=0.153 divg=0.132 Nucleic acid sequence=SEQ ID NO: 274 Amino acid sequence=SEQ ID NO: 974; Antibody Heavy Chain No:16331 germ=IGHV1-2*02 seqid1=50.4 seqid3=50.0 thrd1=0.161 thrd3=0.156 divg=0.132 Nucleic acid sequence=SEQ ID NO: 275 Amino acid sequence=SEQ ID NO: 975; Antibody Heavy Chain No:60175 germ=IGHV1-2*02 seqid1=50.4 seqid3=49.2 thrd1=0.160 thrd3=0.156 divg=0.132 Nucleic acid sequence=SEQ ID NO: 276 Amino acid sequence=SEQ ID NO: 976; Antibody Heavy Chain No:171282 germ=IGHV1-2*02 seqid1=51.2 seqid3=51.5 thrd1=0.153 thrd3=0.192 divg=0.132 Nucleic acid sequence=SEQ ID NO: 277 Amino acid sequence=SEQ ID NO: 977; Antibody Heavy Chain No:63220 germ=IGHV1-2*02 seqid1=50.4 seqid3=50.0 thrd1=0.161 thrd3=0.156 divg=0.132 Nucleic acid sequence=SEQ ID NO: 278 Amino acid sequence=SEQ ID NO: 978; Antibody Heavy Chain No:53630 germ=IGHV1-2*02 seqid1=50.4 seqid3=47.7 thrd1=0.232 thrd3=0.169 divg=0.132 Nucleic acid sequence=SEQ ID NO: 279 Amino acid sequence=SEQ ID NO: 979; Antibody Heavy Chain No:31451 germ=IGHV1-2*02 seqid1=50.4 seqid3=50.0 thrd1=0.161 thrd3=0.156 divg=0.132 Nucleic acid sequence=SEQ ID NO: 280 Amino acid sequence=SEQ ID NO: 980; Antibody Heavy Chain No:40126 germ=IGHV1-2*02 seqid1=49.6 seqid3=48.5 thrd1=0.166 thrd3=0.164 divg=0.132 Nucleic acid sequence=SEQ ID NO: 281 Amino acid sequence=SEQ ID NO: 981; Antibody Heavy Chain No:66324 germ=IGHV1-2*02 seqid1=50.4 seqid3=50.0 thrd1=0.161 thrd3=0.156 divg=0.132 Nucleic acid sequence=SEQ ID NO: 282 Amino acid sequence=SEQ ID NO: 982; Antibody Heavy Chain No:13887 germ=IGHV1-2*02 seqid1=43.0 seqid3=44.6 thrd1=0.258 thrd3=0.192 divg=0.132 Nucleic acid sequence=SEQ ID NO: 283 Amino acid sequence=SEQ ID NO: 983; Antibody Heavy Chain No:27307 germ=IGHV1-2*02 seqid1=50.4 seqid3=50.0 thrd1=0.161 thrd3=0.156 divg=0.132 Nucleic acid sequence=SEQ ID NO: 284 Amino acid sequence=SEQ ID NO: 984; Antibody Heavy Chain No:26779 germ=IGHV1-2*02 seqid1=50.4 seqid3=50.0 thrd1=0.161 thrd3=0.156 divg=0.132 Nucleic acid sequence=SEQ ID NO: 285 Amino acid sequence=SEQ ID NO: 985; Antibody Heavy Chain No:171898 germ=IGHV1-2*02 seqid1=53.7 seqid3=47.7 thrd1=0.093 thrd3=0.133 divg=0.132 Nucleic acid sequence=SEQ ID NO: 286 Amino acid sequence=SEQ ID NO: 986; Antibody Heavy Chain No:13137 germ=IGHV1-2*02 seqid1=50.4 seqid3=50.0 thrd1=0.161 thrd3=0.156 divg=0.132 Nucleic acid sequence=SEQ ID NO: 287 Amino acid sequence=SEQ ID NO: 987; Antibody Heavy Chain No:87705 germ=IGHV1-2*02 seqid1=53.7 seqid3=47.7 thrd1=0.093 thrd3=0.133 divg=0.132 Nucleic acid sequence=SEQ ID NO: 288 Amino acid sequence=SEQ ID NO: 988; Antibody Heavy Chain No:113257 germ=IGHV1-2*02 seqid1=50.4 seqid3=50.0 thrd1=0.161 thrd3=0.156 divg=0.132 Nucleic acid sequence=SEQ ID NO: 289 Amino acid sequence=SEQ ID NO: 989; Antibody Heavy Chain No:29451 germ=IGHV1-2*02 seqid1=50.4 seqid3=50.0 thrd1=0.161 thrd3=0.156 divg=0.132 Nucleic acid sequence=SEQ ID NO: 290 Amino acid sequence=SEQ ID NO: 990; Antibody Heavy Chain No:163834 germ=IGHV1-2*02 seqid1=47.1 seqid3=45.4 thrd1=0.188 thrd3=0.188 divg=0.132 Nucleic acid sequence=SEQ ID NO: 291 Amino acid sequence=SEQ ID NO: 991; Antibody Heavy Chain No:99313 germ=IGHV1-2*02 seqid1=49.6 seqid3=43.1 thrd1=0.099 thrd3=0.136 divg=0.132 Nucleic acid sequence=SEQ ID NO: 292 Amino acid sequence=SEQ ID NO: 992; Antibody Heavy Chain No:94039 germ=IGHV1-2*02 seqid1=50.4 seqid3=50.0 thrd1=0.161 thrd3=0.156 divg=0.132 Nucleic acid sequence=SEQ ID NO: 293 Amino acid sequence=SEQ ID NO: 993; Antibody Heavy Chain No:44862 germ=IGHV1-2*02 seqid1=50.4 seqid3=50.0 thrd1=0.161 thrd3=0.156 divg=0.132 Nucleic acid sequence=SEQ ID NO: 294 Amino acid sequence=SEQ ID NO: 994; Antibody Heavy Chain No:90451 germ=IGHV1-2*02 seqid1=49.6 seqid3=49.2 thrd1=0.160 thrd3=0.156 divg=0.132 Nucleic acid sequence=SEQ ID NO: 295 Amino acid sequence=SEQ ID NO: 995; Antibody Heavy Chain No:62365 germ=IGHV1-2*02 seqid1=50.4 seqid3=50.0 thrd1=0.161 thrd3=0.156 divg=0.132 Nucleic acid sequence=SEQ ID NO: 296 Amino acid sequence=SEQ ID NO: 996; Antibody Heavy Chain No:137307 germ=IGHV1-2*02 seqid1=40.5 seqid3=41.5 thrd1=0.187 thrd3=0.183 divg=0.132 Nucleic acid sequence=SEQ ID NO: 297 Amino acid sequence=SEQ ID NO: 997; Antibody Heavy Chain No:35237 germ=IGHV1-2*02 seqid1=53.7 seqid3=47.7 thrd1=0.093 thrd3=0.133 divg=0.132 Nucleic acid sequence=SEQ ID NO: 298 Amino acid sequence=SEQ ID NO: 998; Antibody Heavy Chain No:85861 germ=IGHV1-2*02 seqid1=50.4 seqid3=50.0 thrd1=0.161 thrd3=0.156 divg=0.132 Nucleic acid sequence=SEQ ID NO: 299 Amino acid sequence=SEQ ID NO: 999; Antibody Heavy Chain No:44765 germ=IGHV1-2*02 seqid1=50.4 seqid3=50.0 thrd1=0.161 thrd3=0.156 divg=0.132 Nucleic acid sequence=SEQ ID NO: 300 Amino acid sequence=SEQ ID NO: 1000; Antibody Heavy Chain No:64006 germ=IGHV1-2*02 seqid1=50.4 seqid3=50.0 thrd1=0.161 thrd3=0.156 divg=0.132 Nucleic acid sequence=SEQ ID NO: 301 Amino acid sequence=SEQ ID NO: 1001; Antibody Heavy Chain No:30706 germ=IGHV1-2*02 seqid1=50.4 seqid3=50.0 thrd1=0.161 thrd3=0.156 divg=0.132 Nucleic acid sequence=SEQ ID NO: 302 Amino acid sequence=SEQ ID NO: 1002; Antibody Heavy Chain No:66921 germ=IGHV1-2*02 seqid1=50.4 seqid3=50.0 thrd1=0.161 thrd3=0.156 divg=0.132 Nucleic acid sequence=SEQ ID NO: 303 Amino acid sequence=SEQ ID NO: 1003; Antibody Heavy Chain No:56340 germ=IGHV1-2*02 seqid1=50.4 seqid3=50.0 thrd1=0.161 thrd3=0.156 divg=0.132 Nucleic acid sequence=SEQ ID NO: 304 Amino acid sequence=SEQ ID NO: 1004; Antibody Heavy Chain No:54385 germ=IGHV1-2*02 seqid1=50.4 seqid3=50.0 thrd1=0.161 thrd3=0.156 divg=0.132 Nucleic acid sequence=SEQ ID NO: 305 Amino acid sequence=SEQ ID NO: 1005; Antibody Heavy Chain No:107464 germ=IGHV1-2*02 seqid1=50.4 seqid3=50.0 thrd1=0.161 thrd3=0.156 divg=0.132 Nucleic acid sequence=SEQ ID NO: 306 Amino acid sequence=SEQ ID NO: 1006; Antibody Heavy Chain No:72997 germ=IGHV1-2*02 seqid1=50.4 seqid3=50.0 thrd1=0.161 thrd3=0.156 divg=0.132 Nucleic acid sequence=SEQ ID NO: 307 Amino acid sequence=SEQ ID NO: 1007; Antibody Heavy Chain No:122440 germ=IGHV1-2*02 seqid1=48.8 seqid3=48.5 thrd1=0.161 thrd3=0.156 divg=0.132 Nucleic acid sequence=SEQ ID NO: 308 Amino acid sequence=SEQ ID NO: 1008; Antibody Heavy Chain No:51611 germ=IGHV1-2*02 seqid1=50.4 seqid3=50.0 thrd1=0.161 thrd3=0.156 divg=0.132 Nucleic acid sequence=SEQ ID NO: 309 Amino acid sequence=SEQ ID NO: 1009; Antibody Heavy Chain No:47198 germ=IGHV1-2*02 seqid1=50.4 seqid3=50.0 thrd1=0.161 thrd3=0.156 divg=0.132 Nucleic acid sequence=SEQ ID NO: 310 Amino acid sequence=SEQ ID NO: 1010; Antibody Heavy Chain No:90259 germ=IGHV1-2*02 seqid1=53.7 seqid3=47.7 thrd1=0.093 thrd3=0.133 divg=0.132 Nucleic acid sequence=SEQ ID NO: 311 Amino acid sequence=SEQ ID NO: 1011; Antibody Heavy Chain No:81876 germ=IGHV1-2*02 seqid1=50.4 seqid3=50.0 thrd1=0.161 thrd3=0.156 divg=0.132 Nucleic acid sequence=SEQ ID NO: 312 Amino acid sequence=SEQ ID NO: 1012; Antibody Heavy Chain No:89609 germ=IGHV1-2*02 seqid1=50.4 seqid3=50.0 thrd1=0.161 thrd3=0.156 divg=0.132 Nucleic acid sequence=SEQ ID NO: 313 Amino acid sequence=SEQ ID NO: 1013; Antibody Heavy Chain No:35904 germ=IGHV1-2*02 seqid1=53.7 seqid3=47.7 thrd1=0.096 thrd3=0.137 divg=0.132 Nucleic acid sequence=SEQ ID NO: 314 Amino acid sequence=SEQ ID NO: 1014; Antibody Heavy Chain No:111059 germ=IGHV1-2*02 seqid1=50.4 seqid3=50.0 thrd1=0.161 thrd3=0.156 divg=0.132 Nucleic acid sequence=SEQ ID NO: 315 Amino acid sequence=SEQ ID NO: 1015; Antibody Heavy Chain No:16161 germ=IGHV1-2*02 seqid1=50.4 seqid3=50.0 thrd1=0.161 thrd3=0.156 divg=0.132 Nucleic acid sequence=SEQ ID NO: 316 Amino acid sequence=SEQ ID NO: 1016; Antibody Heavy Chain No:110880 germ=IGHV1-2*02 seqid1=53.7 seqid3=47.7 thrd1=0.093 thrd3=0.133 divg=0.132 Nucleic acid sequence=SEQ ID NO: 317 Amino acid sequence=SEQ ID NO: 1017; Antibody Heavy Chain No:14765 germ=IGHV1-2*02 seqid1=50.4 seqid3=50.0 thrd1=0.161 thrd3=0.156 divg=0.132 Nucleic acid sequence=SEQ ID NO: 318 Amino acid sequence=SEQ ID NO: 1018; Antibody Heavy Chain No:84533 germ=IGHV1-2*02 seqid1=50.4 seqid3=50.0 thrd1=0.161 thrd3=0.156 divg=0.132 Nucleic acid sequence=SEQ ID NO: 319 Amino acid sequence=SEQ ID NO: 1019; Antibody Heavy Chain No:66611 germ=IGHV1-2*02 seqid1=48.8 seqid3=47.7 thrd1=0.153 thrd3=0.162 divg=0.132 Nucleic acid sequence=SEQ ID NO: 320 Amino acid sequence=SEQ ID NO: 1020; Antibody Heavy Chain No:8697 germ=IGHV1-2*02 seqid1=53.7 seqid3=47.7 thrd1=0.093 thrd3=0.133 divg=0.132 Nucleic acid sequence=SEQ ID NO: 321 Amino acid sequence=SEQ ID NO: 1021; Antibody Heavy Chain No:164229 germ=IGHV1-2*02 seqid1=50.4 seqid3=43.8 thrd1=0.171 thrd3=0.168 divg=0.132 Nucleic acid sequence=SEQ ID NO: 322 Amino acid sequence=SEQ ID NO: 1022; Antibody Heavy Chain No:31295 germ=IGHV1-2*02 seqid1=53.7 seqid3=47.7 thrd1=0.093 thrd3=0.133 divg=0.132 Nucleic acid sequence=SEQ ID NO: 323 Amino acid sequence=SEQ ID NO: 1023; Antibody Heavy Chain No:25528 germ=IGHV1-2*02 seqid1=50.4 seqid3=50.0 thrd1=0.161 thrd3=0.156 divg=0.132 Nucleic acid sequence=SEQ ID NO: 324 Amino acid sequence=SEQ ID NO: 1024; Antibody Heavy Chain No:83584 germ=IGHV1-2*02 seqid1=50.4 seqid3=50.0 thrd1=0.161 thrd3=0.156 divg=0.132 Nucleic acid sequence=SEQ ID NO: 325 Amino acid sequence=SEQ ID NO: 1025; Antibody Heavy Chain No:40574 germ=IGHV1-2*02 seqid1=50.4 seqid3=50.0 thrd1=0.161 thrd3=0.156 divg=0.132 Nucleic acid sequence=SEQ ID NO: 326 Amino acid sequence=SEQ ID NO: 1026; Antibody Heavy Chain No:118566 germ=IGHV1-2*02 seqid1=53.7 seqid3=47.7 thrd1=0.093 thrd3=0.133 divg=0.132 Nucleic acid sequence=SEQ ID NO: 327 Amino acid sequence=SEQ ID NO: 1027; Antibody Heavy Chain No:64619 germ=IGHV1-2*02 seqid1=53.7 seqid3=47.7 thrd1=0.093 thrd3=0.133 divg=0.132 Nucleic acid sequence=SEQ ID NO: 328 Amino acid sequence=SEQ ID NO: 1028; Antibody Heavy Chain No:112548 germ=IGHV1-2*02 seqid1=50.4 seqid3=50.0 thrd1=0.161 thrd3=0.156 divg=0.132 Nucleic acid sequence=SEQ ID NO: 329 Amino acid sequence=SEQ ID NO: 1029; Antibody Heavy Chain No:80024 germ=IGHV1-2*02 seqid1=47.9 seqid3=47.7 thrd1=0.160 thrd3=0.155 divg=0.132 Nucleic acid sequence=SEQ ID NO: 330 Amino acid sequence=SEQ ID NO: 1030; Antibody Heavy Chain No:53014 germ=IGHV1-2*02 seqid1=50.4 seqid3=50.0 thrd1=0.161 thrd3=0.156 divg=0.132 Nucleic acid sequence=SEQ ID NO: 331 Amino acid sequence=SEQ ID NO: 1031; Antibody Heavy Chain No:22889 germ=IGHV1-2*02 seqid1=50.4 seqid3=50.0 thrd1=0.161 thrd3=0.156 divg=0.132 Nucleic acid sequence=SEQ ID NO: 332 Amino acid sequence=SEQ ID NO: 1032; Antibody Heavy Chain No:20603 germ=IGHV1-2*02 seqid1=52.1 seqid3=46.2 thrd1=0.093 thrd3=0.133 divg=0.132 Nucleic acid sequence=SEQ ID NO: 333 Amino acid sequence=SEQ ID NO: 1033; Antibody Heavy Chain No:95127 germ=IGHV1-2*02 seqid1=50.4 seqid3=50.0 thrd1=0.161 thrd3=0.156 divg=0.132 Nucleic acid sequence=SEQ ID NO: 334 Amino acid sequence=SEQ ID NO: 1034; Antibody Heavy Chain No:40882 germ=IGHV1-2*02 seqid1=50.4 seqid3=50.0 thrd1=0.161 thrd3=0.156 divg=0.132 Nucleic acid sequence=SEQ ID NO: 335 Amino acid sequence=SEQ ID NO: 1035; Antibody Heavy Chain No:12779 germ=IGHV1-2*02 seqid1=50.4 seqid3=50.0 thrd1=0.161 thrd3=0.156 divg=0.132 Nucleic acid sequence=SEQ ID NO: 336 Amino acid sequence=SEQ ID NO: 1036; Antibody Heavy Chain No:30393 germ=IGHV1-2*02 seqid1=50.4 seqid3=50.0 thrd1=0.161 thrd3=0.156 divg=0.132 Nucleic acid sequence=SEQ ID NO: 337 Amino acid sequence=SEQ ID NO: 1037; Antibody Heavy Chain No:44033 germ=IGHV1-2*02 seqid1=50.4 seqid3=50.0 thrd1=0.161 thrd3=0.156 divg=0.132 Nucleic acid sequence=SEQ ID NO: 338 Amino acid sequence=SEQ ID NO: 1038; Antibody Heavy Chain No:13199 germ=IGHV1-2*02 seqid1=50.4 seqid3=50.0 thrd1=0.161 thrd3=0.156 divg=0.132 Nucleic acid sequence=SEQ ID NO: 339 Amino acid sequence=SEQ ID NO: 1039; Antibody Heavy Chain No:32566 germ=IGHV1-2*02 seqid1=50.4 seqid3=50.0 thrd1=0.161 thrd3=0.156 divg=0.132 Nucleic acid sequence=SEQ ID NO: 340 Amino acid sequence=SEQ ID NO: 1040; Antibody Heavy Chain No:64977 germ=IGHV1-2*02 seqid1=48.8 seqid3=47.7 thrd1=0.153 thrd3=0.162 divg=0.132 Nucleic acid sequence=SEQ ID NO: 341 Amino acid sequence=SEQ ID NO: 1041; Antibody Heavy Chain No:83943 germ=IGHV1-2*02 seqid1=50.4 seqid3=50.0 thrd1=0.161 thrd3=0.156 divg=0.132 Nucleic acid sequence=SEQ ID NO: 342 Amino acid sequence=SEQ ID NO: 1042; Antibody Heavy Chain No:93877 germ=IGHV1-2*02 seqid1=50.4 seqid3=44.6 thrd1=0.125 thrd3=0.189 divg=0.132 Nucleic acid sequence=SEQ ID NO: 343 Amino acid sequence=SEQ ID NO: 1043; Antibody Heavy Chain No:18689 germ=IGHV1-2*02 seqid1=50.4 seqid3=50.0 thrd1=0.161 thrd3=0.156 divg=0.132 Nucleic acid sequence=SEQ ID NO: 344 Amino acid sequence=SEQ ID NO: 1044; Antibody Heavy Chain No:29339 germ=IGHV1-2*02 seqid1=50.4 seqid3=50.0 thrd1=0.161 thrd3=0.156 divg=0.132 Nucleic acid sequence=SEQ ID NO: 345 Amino acid sequence=SEQ ID NO: 1045; Antibody Heavy Chain No:63209 germ=IGHV1-2*02 seqid1=53.7 seqid3=47.7 thrd1=0.093 thrd3=0.133 divg=0.132 Nucleic acid sequence=SEQ ID NO: 346 Amino acid sequence=SEQ ID NO: 1046; Antibody Heavy Chain No:78362 germ=IGHV1-2*02 seqid1=50.4 seqid3=50.0 thrd1=0.161 thrd3=0.156 divg=0.132 Nucleic acid sequence=SEQ ID NO: 347 Amino acid sequence=SEQ ID NO: 1047; Antibody Heavy Chain No:83864 germ=IGHV1-2*02 seqid1=53.7 seqid3=47.7 thrd1=0.093 thrd3=0.133 divg=0.132 Nucleic acid sequence=SEQ ID NO: 348 Amino acid sequence=SEQ ID NO: 1048; Antibody Heavy Chain No:39670 germ=IGHV1-2*02 seqid1=48.8 seqid3=48.5 thrd1=0.161 thrd3=0.156 divg=0.132 Nucleic acid sequence=SEQ ID NO: 349 Amino acid sequence=SEQ ID NO: 1049; Antibody Heavy Chain No:113372 germ=IGHV1-2*02 seqid1=50.4 seqid3=50.0 thrd1=0.161 thrd3=0.156 divg=0.132 Nucleic acid sequence=SEQ ID NO: 350 Amino acid sequence=SEQ ID NO: 1050; Antibody Heavy Chain No:55937 germ=IGHV1-2*02 seqid1=50.4 seqid3=50.0 thrd1=0.161 thrd3=0.156 divg=0.132 Nucleic acid sequence=SEQ ID NO: 351 Amino acid sequence=SEQ ID NO: 1051; Antibody Heavy Chain No:30882 germ=IGHV1-2*02 seqid1=50.4 seqid3=50.0 thrd1=0.161 thrd3=0.156 divg=0.132 Nucleic acid sequence=SEQ ID NO: 352 Amino acid sequence=SEQ ID NO: 1052; Antibody Heavy Chain No:121824 germ=IGHV1-2*02 seqid1=50.4 seqid3=50.0 thrd1=0.161 thrd3=0.156 divg=0.132 Nucleic acid sequence=SEQ ID NO: 353 Amino acid sequence=SEQ ID NO: 1053; Antibody Heavy Chain No:36567 germ=IGHV1-2*02 seqid1=50.4 seqid3=50.0 thrd1=0.161 thrd3=0.156 divg=0.132 Nucleic acid sequence=SEQ ID NO: 354 Amino acid sequence=SEQ ID NO: 1054; Antibody Heavy Chain No:112475 germ=IGHV1-2*02 seqid1=50.4 seqid3=50.0 thrd1=0.161 thrd3=0.156 divg=0.132 Nucleic acid sequence=SEQ ID NO: 355 Amino acid sequence=SEQ ID NO: 1055; Antibody Heavy Chain No:38636 germ=IGHV1-2*02 seqid1=50.4 seqid3=50.0 thrd1=0.161 thrd3=0.156 divg=0.132 Nucleic acid sequence=SEQ ID NO: 356 Amino acid sequence=SEQ ID NO: 1056; Antibody Heavy Chain No:47990 germ=IGHV1-2*02 seqid1=50.4 seqid3=50.0 thrd1=0.161 thrd3=0.156 divg=0.132 Nucleic acid sequence=SEQ ID NO: 357 Amino acid sequence=SEQ ID NO: 1057; Antibody Heavy Chain No:69898 germ=IGHV1-2*02 seqid1=50.4 seqid3=50.0 thrd1=0.161 thrd3=0.156 divg=0.132 Nucleic acid sequence=SEQ ID NO: 358 Amino acid sequence=SEQ ID NO: 1058; Antibody Heavy Chain No:22432 germ=IGHV1-2*02 seqid1=50.4 seqid3=50.0 thrd1=0.161 thrd3=0.156 divg=0.132 Nucleic acid sequence=SEQ ID NO: 359 Amino acid sequence=SEQ ID NO: 1059; Antibody Heavy Chain No:51559 germ=IGHV1-2*02 seqid1=50.4 seqid3=50.0 thrd1=0.161 thrd3=0.156 divg=0.132 Nucleic acid sequence=SEQ ID NO: 360 Amino acid sequence=SEQ ID NO: 1060; Antibody Heavy Chain No:104370 germ=IGHV1-2*02 seqid1=50.4 seqid3=50.0 thrd1=0.161 thrd3=0.156 divg=0.132 Nucleic acid sequence=SEQ ID NO: 361 Amino acid sequence=SEQ ID NO: 1061; Antibody Heavy Chain No:70186 germ=IGHV1-2*02 seqid1=50.4 seqid3=50.0 thrd1=0.161 thrd3=0.156 divg=0.132 Nucleic acid sequence=SEQ ID NO: 362 Amino acid sequence=SEQ ID NO: 1062; Antibody Heavy Chain No:66807 germ=IGHV1-2*02 seqid1=50.4 seqid3=50.0 thrd1=0.161 thrd3=0.156 divg=0.132 Nucleic acid sequence=SEQ ID NO: 363 Amino acid sequence=SEQ ID NO: 1063; Antibody Heavy Chain No:36621 germ=IGHV1-2*02 seqid1=50.4 seqid3=50.0 thrd1=0.161 thrd3=0.156 divg=0.132 Nucleic acid sequence=SEQ ID NO: 364 Amino acid sequence=SEQ ID NO: 1064; Antibody Heavy Chain No:16321 germ=IGHV1-2*02 seqid1=50.4 seqid3=50.0 thrd1=0.161 thrd3=0.156 divg=0.132 Nucleic acid sequence=SEQ ID NO: 365 Amino acid sequence=SEQ ID NO: 1065; Antibody Heavy Chain No:50350 germ=IGHV1-2*02 seqid1=50.4 seqid3=50.0 thrd1=0.161 thrd3=0.156 divg=0.132 Nucleic acid sequence=SEQ ID NO: 366 Amino acid sequence=SEQ ID NO: 1066; Antibody Heavy Chain No:182546 germ=IGHV1-2*02 seqid1=46.3 seqid3=43.1 thrd1=0.179 thrd3=0.143 divg=0.132 Nucleic acid sequence=SEQ ID NO: 367 Amino acid sequence=SEQ ID NO: 1067; Antibody Heavy Chain No:87519 germ=IGHV1-2*02 seqid1=47.9 seqid3=47.7 thrd1=0.162 thrd3=0.157 divg=0.132 Nucleic acid sequence=SEQ ID NO: 368 Amino acid sequence=SEQ ID NO: 1068; Antibody Heavy Chain No:38456 germ=IGHV1-2*02 seqid1=50.4 seqid3=50.0 thrd1=0.161 thrd3=0.156 divg=0.132 Nucleic acid sequence=SEQ ID NO: 369 Amino acid sequence=SEQ ID NO: 1069; Antibody Heavy Chain No:92098 germ=IGHV1-2*02 seqid1=53.7 seqid3=47.7 thrd1=0.093 thrd3=0.133 divg=0.132 Nucleic acid sequence=SEQ ID NO: 370 Amino acid sequence=SEQ ID NO: 1070; Antibody Heavy Chain No:98786 germ=IGHV1-2*02 seqid1=50.4 seqid3=50.0 thrd1=0.161 thrd3=0.156 divg=0.132 Nucleic acid sequence=SEQ ID NO: 371 Amino acid sequence=SEQ ID NO: 1071; Antibody Heavy Chain No:79026 germ=IGHV1-2*02 seqid1=49.6 seqid3=50.0 thrd1=0.163 thrd3=0.157 divg=0.132 Nucleic acid sequence=SEQ ID NO: 372 Amino acid sequence=SEQ ID NO: 1072; Antibody Heavy Chain No:192622 germ=IGHV1-2*02 seqid1=50.4 seqid3=50.0 thrd1=0.161 thrd3=0.156 divg=0.132 Nucleic acid sequence=SEQ ID NO: 373 Amino acid sequence=SEQ ID NO: 1073; Antibody Heavy Chain No:4423 germ=IGHV1-2*02 seqid1=47.9 seqid3=47.7 thrd1=0.160 thrd3=0.155 divg=0.132 Nucleic acid sequence=SEQ ID NO: 374 Amino acid sequence=SEQ ID NO: 1074; Antibody Heavy Chain No:39390 germ=IGHV1-2*02 seqid1=50.4 seqid3=50.0 thrd1=0.161 thrd3=0.156 divg=0.132 Nucleic acid sequence=SEQ ID NO: 375 Amino acid sequence=SEQ ID NO: 1075; Antibody Heavy Chain No:121691 germ=IGHV1-2*02 seqid1=45.5 seqid3=47.7 thrd1=0.181 thrd3=0.183 divg=0.132 Nucleic acid sequence=SEQ ID NO: 376 Amino acid sequence=SEQ ID NO: 1076; Antibody Heavy Chain No:114705 germ=IGHV1-2*02 seqid1=47.9 seqid3=47.7 thrd1=0.162 thrd3=0.157 divg=0.132 Nucleic acid sequence=SEQ ID NO: 377 Amino acid sequence=SEQ ID NO: 1077; Antibody Heavy Chain No:66658 germ=IGHV1-2*02 seqid1=50.4 seqid3=50.0 thrd1=0.161 thrd3=0.156 divg=0.132 Nucleic acid sequence=SEQ ID NO: 378 Amino acid sequence=SEQ ID NO: 1078; Antibody Heavy Chain No:20622 germ=IGHV1-2*02 seqid1=50.4 seqid3=50.0 thrd1=0.161 thrd3=0.156 divg=0.132 Nucleic acid sequence=SEQ ID NO: 379 Amino acid sequence=SEQ ID NO: 1079; Antibody Heavy Chain No:7790 germ=IGHV1-2*02 seqid1=50.4 seqid3=50.0 thrd1=0.161 thrd3=0.156 divg=0.132 Nucleic acid sequence=SEQ ID NO: 380 Amino acid sequence=SEQ ID NO: 1080; Antibody Heavy Chain No:74326 germ=IGHV1-2*02 seqid1=53.7 seqid3=47.7 thrd1=0.093 thrd3=0.133 divg=0.132 Nucleic acid sequence=SEQ ID NO: 381 Amino acid sequence=SEQ ID NO: 1081; Antibody Heavy Chain No:62399 germ=IGHV1-2*02 seqid1=50.4 seqid3=50.0 thrd1=0.161 thrd3=0.156 divg=0.132 Nucleic acid sequence=SEQ ID NO: 382 Amino acid sequence=SEQ ID NO: 1082; Antibody Heavy Chain No:90523 germ=IGHV1-2*02 seqid1=50.4 seqid3=50.0 thrd1=0.161 thrd3=0.156 divg=0.132 Nucleic acid sequence=SEQ ID NO: 383 Amino acid sequence=SEQ ID NO: 1083; Antibody Heavy Chain No:86744 germ=IGHV1-2*02 seqid1=52.1 seqid3=46.2 thrd1=0.101 thrd3=0.140 divg=0.132 Nucleic acid sequence=SEQ ID NO: 384 Amino acid sequence=SEQ ID NO: 1084; Antibody Heavy Chain No:65521 germ=IGHV1-2*02 seqid1=53.7 seqid3=47.7 thrd1=0.093 thrd3=0.133 divg=0.132 Nucleic acid sequence=SEQ ID NO: 385 Amino acid sequence=SEQ ID NO: 1085; Antibody Heavy Chain No:25587 germ=IGHV1-2*02 seqid1=50.4 seqid3=50.0 thrd1=0.161 thrd3=0.156 divg=0.132 Nucleic acid sequence=SEQ ID NO: 386 Amino acid sequence=SEQ ID NO: 1086; Antibody Heavy Chain No:93763 germ=IGHV1-2*02 seqid1=50.4 seqid3=50.0 thrd1=0.161 thrd3=0.156 divg=0.132 Nucleic acid sequence=SEQ ID NO: 387 Amino acid sequence=SEQ ID NO: 1087; Antibody Heavy Chain No:8204 germ=IGHV1-2*02 seqid1=50.4 seqid3=50.0 thrd1=0.161 thrd3=0.156 divg=0.132 Nucleic acid sequence=SEQ ID NO: 388 Amino acid sequence=SEQ ID NO: 1088; Antibody Heavy Chain No:32439 germ=IGHV1-2*02 seqid1=53.7 seqid3=47.7 thrd1=0.093 thrd3=0.133 divg=0.132 Nucleic acid sequence=SEQ ID NO: 389 Amino acid sequence=SEQ ID NO: 1089; Antibody Heavy Chain No:29882 germ=IGHV1-2*02 seqid1=50.4 seqid3=50.0 thrd1=0.161 thrd3=0.156 divg=0.132 Nucleic acid sequence=SEQ ID NO: 390 Amino acid sequence=SEQ ID NO: 1090; Antibody Heavy Chain No:33693 germ=IGHV1-2*02 seqid1=50.4 seqid3=50.0 thrd1=0.161 thrd3=0.156 divg=0.132 Nucleic acid sequence=SEQ ID NO: 391 Amino acid sequence=SEQ ID NO: 1091; Antibody Heavy Chain No:13076 germ=IGHV1-2*02 seqid1=50.4 seqid3=50.0 thrd1=0.161 thrd3=0.156 divg=0.132 Nucleic acid sequence=SEQ ID NO: 392 Amino acid sequence=SEQ ID NO: 1092; Antibody Heavy Chain No:31565 germ=IGHV1-2*02 seqid1=50.4 seqid3=50.0 thrd1=0.161 thrd3=0.156 divg=0.132 Nucleic acid sequence=SEQ ID NO: 393 Amino acid sequence=SEQ ID NO: 1093; Antibody Heavy Chain No:114518 germ=IGHV1-2*02 seqid1=50.4 seqid3=50.0 thrd1=0.161 thrd3=0.156 divg=0.132 Nucleic acid sequence=SEQ ID NO: 394 Amino acid sequence=SEQ ID NO: 1094; Antibody Heavy Chain No:55150 germ=IGHV1-2*02 seqid1=39.7 seqid3=40.8 thrd1=0.204 thrd3=0.313 divg=0.132 Nucleic acid sequence=SEQ ID NO: 395 Amino acid sequence=SEQ ID NO: 1095; Antibody Heavy Chain No:83555 germ=IGHV1-2*02 seqid1=47.9 seqid3=47.7 thrd1=0.162 thrd3=0.157 divg=0.132 Nucleic acid sequence=SEQ ID NO: 396 Amino acid sequence=SEQ ID NO: 1096; Antibody Heavy Chain No:57699 germ=IGHV1-2*02 seqid1=52.9 seqid3=46.9 thrd1=0.192 thrd3=0.214 divg=0.132 Nucleic acid sequence=SEQ ID NO: 397 Amino acid sequence=SEQ ID NO: 1097; Antibody Heavy Chain No:46426 germ=IGHV1-2*02 seqid1=50.4 seqid3=50.0 thrd1=0.161 thrd3=0.156 divg=0.132 Nucleic acid sequence=SEQ ID NO: 398 Amino acid sequence=SEQ ID NO: 1098; Antibody Heavy Chain No:50130 germ=IGHV1-2*02 seqid1=50.4 seqid3=50.0 thrd1=0.161 thrd3=0.156 divg=0.132 Nucleic acid sequence=SEQ ID NO: 399 Amino acid sequence=SEQ ID NO: 1099; Antibody Heavy Chain No:17965 germ=IGHV1-2*02 seqid1=50.4 seqid3=50.0 thrd1=0.161 thrd3=0.156 divg=0.132 Nucleic acid sequence=SEQ ID NO: 400 Amino acid sequence=SEQ ID NO: 1100; Antibody Heavy Chain No:40699 germ=IGHV1-2*02 seqid1=50.4 seqid3=50.0 thrd1=0.161 thrd3=0.156 divg=0.132 Nucleic acid sequence=SEQ ID NO: 401 Amino acid sequence=SEQ ID NO: 1101; Antibody Heavy Chain No:17552 germ=IGHV1-2*02 seqid1=50.4 seqid3=50.0 thrd1=0.161 thrd3=0.156 divg=0.132 Nucleic acid sequence=SEQ ID NO: 402 Amino acid sequence=SEQ ID NO: 1102; Antibody Heavy Chain No:73425 germ=IGHV1-2*02 seqid1=50.4 seqid3=50.0 thrd1=0.161 thrd3=0.156 divg=0.132 Nucleic acid sequence=SEQ ID NO: 403 Amino acid sequence=SEQ ID NO: 1103; Antibody Heavy Chain No:20437 germ=IGHV1-2*02 seqid1=53.7 seqid3=47.7 thrd1=0.093 thrd3=0.133 divg=0.132 Nucleic acid sequence=SEQ ID NO: 404 Amino acid sequence=SEQ ID NO: 1104; Antibody Heavy Chain No:59091 germ=IGHV1-2*02 seqid1=49.6 seqid3=49.2 thrd1=0.158 thrd3=0.154 divg=0.132 Nucleic acid sequence=SEQ ID NO: 405 Amino acid sequence=SEQ ID NO: 1105; Antibody Heavy Chain No:21770 germ=IGHV1-2*02 seqid1=53.7 seqid3=47.7 thrd1=0.093 thrd3=0.133 divg=0.132 Nucleic acid sequence=SEQ ID NO: 406 Amino acid sequence=SEQ ID NO: 1106; Antibody Heavy Chain No:11760 germ=IGHV1-2*02 seqid1=50.4 seqid3=50.0 thrd1=0.161 thrd3=0.156 divg=0.132 Nucleic acid sequence=SEQ ID NO: 407 Amino acid sequence=SEQ ID NO: 1107; Antibody Heavy Chain No:92232 germ=IGHV1-2*02 seqid1=50.4 seqid3=50.0 thrd1=0.161 thrd3=0.156 divg=0.132 Nucleic acid sequence=SEQ ID NO: 408 Amino acid sequence=SEQ ID NO: 1108; Antibody Heavy Chain No:77905 germ=IGHV1-2*02 seqid1=50.4 seqid3=50.0 thrd1=0.161 thrd3=0.156 divg=0.132 Nucleic acid sequence=SEQ ID NO: 409 Amino acid sequence=SEQ ID NO: 1109; Antibody Heavy Chain No:114286 germ=IGHV1-2*02 seqid1=50.4 seqid3=50.0 thrd1=0.161 thrd3=0.156 divg=0.132 Nucleic acid sequence=SEQ ID NO: 410 Amino acid sequence=SEQ ID NO: 1110; Antibody Heavy Chain No:17493 germ=IGHV1-2*02 seqid1=53.7 seqid3=47.7 thrd1=0.093 thrd3=0.133 divg=0.132 Nucleic acid sequence=SEQ ID NO: 411 Amino acid sequence=SEQ ID NO: 1111; Antibody Heavy Chain No:134356 germ=IGHV1-2*02 seqid1=50.4 seqid3=50.0 thrd1=0.161 thrd3=0.156 divg=0.132 Nucleic acid sequence=SEQ ID NO: 412 Amino acid sequence=SEQ ID NO: 1112; Antibody Heavy Chain No:55840 germ=IGHV1-2*02 seqid1=53.7 seqid3=47.7 thrd1=0.093 thrd3=0.133 divg=0.128 Nucleic acid sequence=SEQ ID NO: 413 Amino acid sequence=SEQ ID NO: 1113; Antibody Heavy Chain No:20575 germ=IGHV1-2*02 seqid1=43.8 seqid3=45.4 thrd1=0.253 thrd3=0.185 divg=0.128 Nucleic acid sequence=SEQ ID NO: 414 Amino acid sequence=SEQ ID NO: 1114; Antibody Heavy Chain No:31418 germ=IGHV1-2*02 seqid1=53.7 seqid3=47.7 thrd1=0.093 thrd3=0.133 divg=0.128 Nucleic acid sequence=SEQ ID NO: 415 Amino acid sequence=SEQ ID NO: 1115; Antibody Heavy Chain No:25111 germ=IGHV1-2*02 seqid1=53.7 seqid3=47.7 thrd1=0.093 thrd3=0.133 divg=0.128 Nucleic acid sequence=SEQ ID NO: 416 Amino acid sequence=SEQ ID NO: 1116; Antibody Heavy Chain No:6508 germ=IGHV1-2*02 seqid1=53.7 seqid3=47.7 thrd1=0.093 thrd3=0.133 divg=0.128 Nucleic acid sequence=SEQ ID NO: 417 Amino acid sequence=SEQ ID NO: 1117; Antibody Heavy Chain No:34999 germ=IGHV1-2*02 seqid1=53.7 seqid3=47.7 thrd1=0.093 thrd3=0.133 divg=0.128 Nucleic acid sequence=SEQ ID NO: 418 Amino acid sequence=SEQ ID NO: 1118; Antibody Heavy Chain No:46977 germ=IGHV1-2*02 seqid1=53.7 seqid3=47.7 thrd1=0.093 thrd3=0.133 divg=0.128 Nucleic acid sequence=SEQ ID NO: 419 Amino acid sequence=SEQ ID NO: 1119; Antibody Heavy Chain No:16971 germ=IGHV1-2*02 seqid1=50.4 seqid3=50.0 thrd1=0.161 thrd3=0.156 divg=0.128 Nucleic acid sequence=SEQ ID NO: 420 Amino acid sequence=SEQ ID NO: 1120; Antibody Heavy Chain No:42695 germ=IGHV1-2*02 seqid1=52.1 seqid3=47.7 thrd1=0.187 thrd3=0.130 divg=0.128 Nucleic acid sequence=SEQ ID NO: 421 Amino acid sequence=SEQ ID NO: 1121; Antibody Heavy Chain No:40345 germ=IGHV1-2*02 seqid1=53.7 seqid3=47.7 thrd1=0.093 thrd3=0.133 divg=0.128 Nucleic acid sequence=SEQ ID NO: 422 Amino acid sequence=SEQ ID NO: 1122; Antibody Heavy Chain No:12622 germ=IGHV1-2*02 seqid1=53.7 seqid3=47.7 thrd1=0.093 thrd3=0.133 divg=0.128 Nucleic acid sequence=SEQ ID NO: 423 Amino acid sequence=SEQ ID NO: 1123; Antibody Heavy Chain No:17063 germ=IGHV1-2*02 seqid1=51.2 seqid3=50.8 thrd1=0.172 thrd3=0.145 divg=0.128 Nucleic acid sequence=SEQ ID NO: 424 Amino acid sequence=SEQ ID NO: 1124; Antibody Heavy Chain No:49945 germ=IGHV1-2*02 seqid1=50.4 seqid3=44.6 thrd1=0.105 thrd3=0.149 divg=0.128 Nucleic acid sequence=SEQ ID NO: 425 Amino acid sequence=SEQ ID NO: 1125; Antibody Heavy Chain No:47052 germ=IGHV1-2*02 seqid1=52.9 seqid3=49.2 thrd1=0.117 thrd3=0.117 divg=0.128 Nucleic acid sequence=SEQ ID NO: 426 Amino acid sequence=SEQ ID NO: 1126; Antibody Heavy Chain No:63586 germ=IGHV1-2*02 seqid1=53.7 seqid3=47.7 thrd1=0.093 thrd3=0.133 divg=0.128 Nucleic acid sequence=SEQ ID NO: 427 Amino acid sequence=SEQ ID NO: 1127; Antibody Heavy Chain No:92372 germ=IGHV1-2*02 seqid1=52.9 seqid3=50.0 thrd1=0.170 thrd3=0.157 divg=0.128 Nucleic acid sequence=SEQ ID NO: 428 Amino acid sequence=SEQ ID NO: 1128; Antibody Heavy Chain No:31043 germ=IGHV1-2*02 seqid1=53.7 seqid3=47.7 thrd1=0.093 thrd3=0.133 divg=0.128 Nucleic acid sequence=SEQ ID NO: 429 Amino acid sequence=SEQ ID NO: 1129; Antibody Heavy Chain No:10325 germ=IGHV1-2*02 seqid1=50.4 seqid3=50.0 thrd1=0.161 thrd3=0.156 divg=0.128 Nucleic acid sequence=SEQ ID NO: 430 Amino acid sequence=SEQ ID NO: 1130; Antibody Heavy Chain No:34950 germ=IGHV1-2*02 seqid1=53.7 seqid3=47.7 thrd1=0.093 thrd3=0.133 divg=0.128 Nucleic acid sequence=SEQ ID NO: 431 Amino acid sequence=SEQ ID NO: 1131; Antibody Heavy Chain No:31131 germ=IGHV1-2*02 seqid1=53.7 seqid3=47.7 thrd1=0.093 thrd3=0.133 divg=0.128 Nucleic acid sequence=SEQ ID NO: 432 Amino acid sequence=SEQ ID NO: 1132; Antibody Heavy Chain No:35353 germ=IGHV1-2*02 seqid1=53.7 seqid3=47.7 thrd1=0.093 thrd3=0.133 divg=0.128 Nucleic acid sequence=SEQ ID NO: 433 Amino acid sequence=SEQ ID NO: 1133; Antibody Heavy Chain No:46948 germ=IGHV1-2*02 seqid1=53.7 seqid3=47.7 thrd1=0.093 thrd3=0.133 divg=0.128 Nucleic acid sequence=SEQ ID NO: 434 Amino acid sequence=SEQ ID NO: 1134; Antibody Heavy Chain No:65582 germ=IGHV1-2*02 seqid1=50.4 seqid3=50.0 thrd1=0.161 thrd3=0.156 divg=0.128 Nucleic acid sequence=SEQ ID NO: 435 Amino acid sequence=SEQ ID NO: 1135; Antibody Heavy Chain No:79430 germ=IGHV1-2*02 seqid1=53.7 seqid3=47.7 thrd1=0.093 thrd3=0.133 divg=0.128 Nucleic acid sequence=SEQ ID NO: 436 Amino acid sequence=SEQ ID NO: 1136; Antibody Heavy Chain No:35657 germ=IGHV1-2*02 seqid1=50.4 seqid3=46.9 thrd1=0.162 thrd3=0.185 divg=0.128 Nucleic acid sequence=SEQ ID NO: 437 Amino acid sequence=SEQ ID NO: 1137; Antibody Heavy Chain No:60213 germ=IGHV1-2*02 seqid1=53.7 seqid3=47.7 thrd1=0.093 thrd3=0.133 divg=0.128 Nucleic acid sequence=SEQ ID NO: 438 Amino acid sequence=SEQ ID NO: 1138; Antibody Heavy Chain No:114115 germ=IGHV1-2*02 seqid1=53.7 seqid3=47.7 thrd1=0.093 thrd3=0.133 divg=0.128 Nucleic acid sequence=SEQ ID NO: 439 Amino acid sequence=SEQ ID NO: 1139; Antibody Heavy Chain No:33812 germ=IGHV1-2*02 seqid1=53.7 seqid3=47.7 thrd1=0.093 thrd3=0.133 divg=0.128 Nucleic acid sequence=SEQ ID NO: 440 Amino acid sequence=SEQ ID NO: 1140; Antibody Heavy Chain No:8579 germ=IGHV1-2*02 seqid1=53.7 seqid3=47.7 thrd1=0.093 thrd3=0.133 divg=0.128 Nucleic acid sequence=SEQ ID NO: 441 Amino acid sequence=SEQ ID NO: 1141; Antibody Heavy Chain No:139116 germ=IGHV1-2*02 seqid1=53.7 seqid3=47.7 thrd1=0.093 thrd3=0.133 divg=0.128 Nucleic acid sequence=SEQ ID NO: 442 Amino acid sequence=SEQ ID NO: 1142; Antibody Heavy Chain No:22596 germ=IGHV1-2*02 seqid1=53.7 seqid3=47.7 thrd1=0.093 thrd3=0.133 divg=0.128 Nucleic acid sequence=SEQ ID NO: 443 Amino acid sequence=SEQ ID NO: 1143; Antibody Heavy Chain No:34400 germ=IGHV1-2*02 seqid1=50.4 seqid3=50.0 thrd1=0.161 thrd3=0.156 divg=0.128 Nucleic acid sequence=SEQ ID NO: 444 Amino acid sequence=SEQ ID NO: 1144; Antibody Heavy Chain No:115582 germ=IGHV1-2*02 seqid1=52.1 seqid3=47.7 thrd1=0.187 thrd3=0.130 divg=0.128 Nucleic acid sequence=SEQ ID NO: 445 Amino acid sequence=SEQ ID NO: 1145; Antibody Heavy Chain No:53897 germ=IGHV1-2*02 seqid1=53.7 seqid3=47.7 thrd1=0.093 thrd3=0.133 divg=0.128 Nucleic acid sequence=SEQ ID NO: 446 Amino acid sequence=SEQ ID NO: 1146; Antibody Heavy Chain No:18972 germ=IGHV1-2*02 seqid1=53.7 seqid3=47.7 thrd1=0.093 thrd3=0.133 divg=0.128 Nucleic acid sequence=SEQ ID NO: 447 Amino acid sequence=SEQ ID NO: 1147; Antibody Heavy Chain No:38620 germ=IGHV1-2*02 seqid1=51.2 seqid3=50.0 thrd1=0.160 thrd3=0.155 divg=0.128 Nucleic acid sequence=SEQ ID NO: 448 Amino acid sequence=SEQ ID NO: 1148; Antibody Heavy Chain No:109187 germ=IGHV1-2*02 seqid1=53.7 seqid3=47.7 thrd1=0.093 thrd3=0.133 divg=0.128 Nucleic acid sequence=SEQ ID NO: 449 Amino acid sequence=SEQ ID NO: 1149; Antibody Heavy Chain No:14179 germ=IGHV1-2*02 seqid1=51.2 seqid3=50.0 thrd1=0.160 thrd3=0.155 divg=0.128 Nucleic acid sequence=SEQ ID NO: 450 Amino acid sequence=SEQ ID NO: 1150; Antibody Heavy Chain No:66584 germ=IGHV1-2*02 seqid1=53.7 seqid3=47.7 thrd1=0.093 thrd3=0.133 divg=0.128 Nucleic acid sequence=SEQ ID NO: 451 Amino acid sequence=SEQ ID NO: 1151; Antibody Heavy Chain No:7295 germ=IGHV1-2*02 seqid1=49.6 seqid3=51.5 thrd1=0.154 thrd3=0.196 divg=0.128 Nucleic acid sequence=SEQ ID NO: 452 Amino acid sequence=SEQ ID NO: 1152; Antibody Heavy Chain No:82463 germ=IGHV1-2*02 seqid1=54.5 seqid3=50.8 thrd1=0.150 thrd3=0.120 divg=0.128 Nucleic acid sequence=SEQ ID NO: 453 Amino acid sequence=SEQ ID NO: 1153; Antibody Heavy Chain No:142429 germ=IGHV1-2*02 seqid1=53.7 seqid3=46.2 thrd1=0.100 thrd3=0.138 divg=0.128 Nucleic acid sequence=SEQ ID NO: 454 Amino acid sequence=SEQ ID NO: 1154; Antibody Heavy Chain No:39408 germ=IGHV1-2*02 seqid1=44.6 seqid3=46.2 thrd1=0.218 thrd3=0.168 divg=0.125 Nucleic acid sequence=SEQ ID NO: 455 Amino acid sequence=SEQ ID NO: 1155; Antibody Heavy Chain No:71215 germ=IGHV1-2*02 seqid1=43.8 seqid3=45.4 thrd1=0.219 thrd3=0.167 divg=0.125 Nucleic acid sequence=SEQ ID NO: 456 Amino acid sequence=SEQ ID NO: 1156; Antibody Heavy Chain No:9788 germ=IGHV1-2*02 seqid1=49.6 seqid3=46.2 thrd1=0.188 thrd3=0.174 divg=0.125 Nucleic acid sequence=SEQ ID NO: 457 Amino acid sequence=SEQ ID NO: 1157; Antibody Heavy Chain No:37061 germ=IGHV1-2*02 seqid1=51.2 seqid3=50.8 thrd1=0.172 thrd3=0.226 divg=0.125 Nucleic acid sequence=SEQ ID NO: 458 Amino acid sequence=SEQ ID NO: 1158; Antibody Heavy Chain No:115015 germ=IGHV1-2*02 seqid1=53.7 seqid3=50.8 thrd1=0.147 thrd3=0.131 divg=0.125 Nucleic acid sequence=SEQ ID NO: 459 Amino acid sequence=SEQ ID NO: 1159; Antibody Heavy Chain No:46793 germ=IGHV1-2*02 seqid1=44.6 seqid3=46.2 thrd1=0.247 thrd3=0.168 divg=0.125 Nucleic acid sequence=SEQ ID NO: 460 Amino acid sequence=SEQ ID NO: 1160; Antibody Heavy Chain No:80516 germ=IGHV1-2*02 seqid1=47.1 seqid3=45.4 thrd1=0.187 thrd3=0.204 divg=0.125 Nucleic acid sequence=SEQ ID NO: 461 Amino acid sequence=SEQ ID NO: 1161; Antibody Heavy Chain No:76415 germ=IGHV1-2*02 seqid1=49.6 seqid3=47.7 thrd1=0.196 thrd3=0.218 divg=0.125 Nucleic acid sequence=SEQ ID NO: 462 Amino acid sequence=SEQ ID NO: 1162; Antibody Heavy Chain No:154569 germ=IGHV1-2*02 seqid1=47.9 seqid3=49.2 thrd1=0.206 thrd3=0.150 divg=0.125 Nucleic acid sequence=SEQ ID NO: 463 Amino acid sequence=SEQ ID NO: 1163; Antibody Heavy Chain No:104939 germ=IGHV1-2*02 seqid1=52.1 seqid3=53.8 thrd1=0.176 thrd3=0.128 divg=0.122 Nucleic acid sequence=SEQ ID NO: 464 Amino acid sequence=SEQ ID NO: 1164; Antibody Heavy Chain No:92580 germ=IGHV1-2*02 seqid1=49.6 seqid3=48.5 thrd1=0.190 thrd3=0.147 divg=0.122 Nucleic acid sequence=SEQ ID NO: 465 Amino acid sequence=SEQ ID NO: 1165; Antibody Heavy Chain No:30625 germ=IGHV1-2*02 seqid1=53.7 seqid3=50.0 thrd1=0.146 thrd3=0.132 divg=0.122 Nucleic acid sequence=SEQ ID NO: 466 Amino acid sequence=SEQ ID NO: 1166; Antibody Heavy Chain No:91867 germ=IGHV1-2*02 seqid1=51.2 seqid3=47.7 thrd1=0.225 thrd3=0.156 divg=0.122 Nucleic acid sequence=SEQ ID NO: 467 Amino acid sequence=SEQ ID NO: 1167; Antibody Heavy Chain No:62307 germ=IGHV1-2*02 seqid1=48.8 seqid3=47.7 thrd1=0.172 thrd3=0.164 divg=0.122 Nucleic acid sequence=SEQ ID NO: 468 Amino acid sequence=SEQ ID NO: 1168; Antibody Heavy Chain No:26484 germ=IGHV1-2*02 seqid1=54.5 seqid3=47.7 thrd1=0.183 thrd3=0.154 divg=0.122 Nucleic acid sequence=SEQ ID NO: 469 Amino acid sequence=SEQ ID NO: 1169; Antibody Heavy Chain No:40754 germ=IGHV1-2*02 seqid1=52.1 seqid3=50.8 thrd1=0.163 thrd3=0.159 divg=0.122 Nucleic acid sequence=SEQ ID NO: 470 Amino acid sequence=SEQ ID NO: 1170; Antibody Heavy Chain No:151057 germ=IGHV1-2*02 seqid1=50.4 seqid3=52.3 thrd1=0.152 thrd3=0.191 divg=0.122 Nucleic acid sequence=SEQ ID NO: 471 Amino acid sequence=SEQ ID NO: 1171; Antibody Heavy Chain No:51285 germ=IGHV1-2*02 seqid1=53.7 seqid3=44.6 thrd1=0.204 thrd3=0.155 divg=0.122 Nucleic acid sequence=SEQ ID NO: 472 Amino acid sequence=SEQ ID NO: 1172; Antibody Heavy Chain No:23038 germ=IGHV1-2*02 seqid1=52.1 seqid3=50.0 thrd1=0.147 thrd3=0.135 divg=0.122 Nucleic acid sequence=SEQ ID NO: 473 Amino acid sequence=SEQ ID NO: 1173; Antibody Heavy Chain No:118516 germ=IGHV1-2*02 seqid1=53.7 seqid3=50.8 thrd1=0.158 thrd3=0.114 divg=0.122 Nucleic acid sequence=SEQ ID NO: 474 Amino acid sequence=SEQ ID NO: 1174; Antibody Heavy Chain No:54561 germ=IGHV1-2*02 seqid1=51.2 seqid3=50.0 thrd1=0.173 thrd3=0.165 divg=0.122 Nucleic acid sequence=SEQ ID NO: 475 Amino acid sequence=SEQ ID NO: 1175; Antibody Heavy Chain No:7907 germ=IGHV1-2*02 seqid1=47.1 seqid3=48.5 thrd1=0.216 thrd3=0.163 divg=0.122 Nucleic acid sequence=SEQ ID NO: 476 Amino acid sequence=SEQ ID NO: 1176; Antibody Heavy Chain No:48955 germ=IGHV1-2*02 seqid1=52.9 seqid3=44.6 thrd1=0.208 thrd3=0.161 divg=0.122 Nucleic acid sequence=SEQ ID NO: 477 Amino acid sequence=SEQ ID NO: 1177; Antibody Heavy Chain No:124460 germ=IGHV1-2*02 seqid1=45.5 seqid3=46.9 thrd1=0.216 thrd3=0.165 divg=0.118 Nucleic acid sequence=SEQ ID NO: 478 Amino acid sequence=SEQ ID NO: 1178; Antibody Heavy Chain No:60838 germ=IGHV1-2*02 seqid1=45.5 seqid3=45.4 thrd1=0.188 thrd3=0.145 divg=0.118 Nucleic acid sequence=SEQ ID NO: 479 Amino acid sequence=SEQ ID NO: 1179; Antibody Heavy Chain No:9327 germ=IGHV1-2*02 seqid1=54.5 seqid3=50.8 thrd1=0.136 thrd3=0.112 divg=0.118 Nucleic acid sequence=SEQ ID NO: 480 Amino acid sequence=SEQ ID NO: 1180; Antibody Heavy Chain No:12603 germ=IGHV1-2*02 seqid1=44.6 seqid3=46.2 thrd1=0.218 thrd3=0.168 divg=0.118 Nucleic acid sequence=SEQ ID NO: 481 Amino acid sequence=SEQ ID NO: 1181; Antibody Heavy Chain No:67294 germ=IGHV1-2*02 seqid1=41.3 seqid3=43.8 thrd1=0.199 thrd3=0.390 divg=0.118 Nucleic acid sequence=SEQ ID NO: 482 Amino acid sequence=SEQ ID NO: 1182; Antibody Heavy Chain No:31882 germ=IGHV1-2*02 seqid1=43.8 seqid3=45.4 thrd1=0.212 thrd3=0.160 divg=0.118 Nucleic acid sequence=SEQ ID NO: 483 Amino acid sequence=SEQ ID NO: 1183; Antibody Heavy Chain No:7187 germ=IGHV1-2*02 seqid1=47.1 seqid3=48.5 thrd1=0.216 thrd3=0.163 divg=0.118 Nucleic acid sequence=SEQ ID NO: 484 Amino acid sequence=SEQ ID NO: 1184; Antibody Heavy Chain No:11340 germ=IGHV1-2*02 seqid1=48.8 seqid3=47.7 thrd1=0.150 thrd3=0.118 divg=0.118 Nucleic acid sequence=SEQ ID NO: 485 Amino acid sequence=SEQ ID NO: 1185; Antibody Heavy Chain No:21889 germ=IGHV1-2*02 seqid1=54.5 seqid3=50.0 thrd1=0.153 thrd3=0.108 divg=0.118 Nucleic acid sequence=SEQ ID NO: 486 Amino acid sequence=SEQ ID NO: 1186; Antibody Heavy Chain No:48803 germ=IGHV1-2*02 seqid1=53.7 seqid3=50.8 thrd1=0.158 thrd3=0.114 divg=0.118 Nucleic acid sequence=SEQ ID NO: 487 Amino acid sequence=SEQ ID NO: 1187; Antibody Heavy Chain No:26563 germ=IGHV1-2*02 seqid1=43.8 seqid3=45.4 thrd1=0.212 thrd3=0.160 divg=0.118 Nucleic acid sequence=SEQ ID NO: 488 Amino acid sequence=SEQ ID NO: 1188; Antibody Heavy Chain No:5049 germ=IGHV1-2*02 seqid1=54.5 seqid3=50.8 thrd1=0.153 thrd3=0.111 divg=0.118 Nucleic acid sequence=SEQ ID NO: 489 Amino acid sequence=SEQ ID NO: 1189; Antibody Heavy Chain No:52934 germ=IGHV1-2*02 seqid1=52.9 seqid3=48.5 thrd1=0.207 thrd3=0.173 divg=0.118 Nucleic acid sequence=SEQ ID NO: 490 Amino acid sequence=SEQ ID NO: 1190; Antibody Heavy Chain No:131623 germ=IGHV1-2*02 seqid1=46.3 seqid3=48.5 thrd1=0.217 thrd3=0.163 divg=0.118 Nucleic acid sequence=SEQ ID NO: 491 Amino acid sequence=SEQ ID NO: 1191; Antibody Heavy Chain No:32431 germ=IGHV1-2*02 seqid1=48.8 seqid3=44.6 thrd1=0.198 thrd3=0.144 divg=0.118 Nucleic acid sequence=SEQ ID NO: 492 Amino acid sequence=SEQ ID NO: 1192; Antibody Heavy Chain No:49222 germ=IGHV1-2*02 seqid1=52.9 seqid3=49.2 thrd1=0.156 thrd3=0.168 divg=0.118 Nucleic acid sequence=SEQ ID NO: 493 Amino acid sequence=SEQ ID NO: 1193; Antibody Heavy Chain No:7766 germ=IGHV1-2*02 seqid1=47.1 seqid3=48.5 thrd1=0.214 thrd3=0.161 divg=0.118 Nucleic acid sequence=SEQ ID NO: 494 Amino acid sequence=SEQ ID NO: 1194; Antibody Heavy Chain No:111944 germ=IGHV1-2*02 seqid1=44.6 seqid3=46.2 thrd1=0.247 thrd3=0.168 divg=0.118 Nucleic acid sequence=SEQ ID NO: 495 Amino acid sequence=SEQ ID NO: 1195; Antibody Heavy Chain No:42112 germ=IGHV1-2*02 seqid1=47.9 seqid3=49.2 thrd1=0.167 thrd3=0.208 divg=0.118 Nucleic acid sequence=SEQ ID NO: 496 Amino acid sequence=SEQ ID NO: 1196; Antibody Heavy Chain No:130294 germ=IGHV1-2*02 seqid1=49.6 seqid3=48.5 thrd1=0.149 thrd3=0.117 divg=0.115 Nucleic acid sequence=SEQ ID NO: 497 Amino acid sequence=SEQ ID NO: 1197; Antibody Heavy Chain No:8818 germ=IGHV1-2*02 seqid1=48.8 seqid3=45.4 thrd1=0.193 thrd3=0.143 divg=0.115 Nucleic acid sequence=SEQ ID NO: 498 Amino acid sequence=SEQ ID NO: 1198; Antibody Heavy Chain No:84071 germ=IGHV1-2*02 seqid1=49.6 seqid3=50.8 thrd1=0.165 thrd3=0.215 divg=0.115 Nucleic acid sequence=SEQ ID NO: 499 Amino acid sequence=SEQ ID NO: 1199; Antibody Heavy Chain No:25068 germ=IGHV1-2*02 seqid1=53.7 seqid3=50.8 thrd1=0.158 thrd3=0.114 divg=0.115 Nucleic acid sequence=SEQ ID NO: 500 Amino acid sequence=SEQ ID NO: 1200; Antibody Heavy Chain No:2768 germ=IGHV1-2*02 seqid1=46.3 seqid3=43.1 thrd1=0.187 thrd3=0.305 divg=0.115 Nucleic acid sequence=SEQ ID NO: 501 Amino acid sequence=SEQ ID NO: 1201; Antibody Heavy Chain No:16010 germ=IGHV1-2*02 seqid1=52.9 seqid3=50.0 thrd1=0.150 thrd3=0.166 divg=0.115 Nucleic acid sequence=SEQ ID NO: 502 Amino acid sequence=SEQ ID NO: 1202; Antibody Heavy Chain No:60573 germ=IGHV1-2*02 seqid1=48.8 seqid3=48.5 thrd1=0.181 thrd3=0.151 divg=0.115 Nucleic acid sequence=SEQ ID NO: 503 Amino acid sequence=SEQ ID NO: 1203; Antibody Heavy Chain No:75010 germ=IGHV1-2*02 seqid1=49.6 seqid3=50.8 thrd1=0.165 thrd3=0.215 divg=0.115 Nucleic acid sequence=SEQ ID NO: 504 Amino acid sequence=SEQ ID NO: 1204; Antibody Heavy Chain No:56346 germ=IGHV1-2*02 seqid1=52.9 seqid3=50.0 thrd1=0.150 thrd3=0.166 divg=0.115 Nucleic acid sequence=SEQ ID NO: 505 Amino acid sequence=SEQ ID NO: 1205; Antibody Heavy Chain No:15961 germ=IGHV1-2*02 seqid1=49.6 seqid3=51.5 thrd1=0.164 thrd3=0.202 divg=0.115 Nucleic acid sequence=SEQ ID NO: 506 Amino acid sequence=SEQ ID NO: 1206; Antibody Heavy Chain No:6826 germ=IGHV1-2*02 seqid1=51.2 seqid3=52.3 thrd1=0.185 thrd3=0.160 divg=0.115 Nucleic acid sequence=SEQ ID NO: 507 Amino acid sequence=SEQ ID NO: 1207; Antibody Heavy Chain No:64926 germ=IGHV1-2*02 seqid1=49.6 seqid3=50.8 thrd1=0.165 thrd3=0.215 divg=0.115 Nucleic acid sequence=SEQ ID NO: 508 Amino acid sequence=SEQ ID NO: 1208; Antibody Heavy Chain No:79151 germ=IGHV1-2*02 seqid1=46.3 seqid3=46.2 thrd1=0.183 thrd3=0.146 divg=0.115 Nucleic acid sequence=SEQ ID NO: 509 Amino acid sequence=SEQ ID NO: 1209; Antibody Heavy Chain No:30800 germ=IGHV1-2*02 seqid1=53.7 seqid3=50.0 thrd1=0.155 thrd3=0.108 divg=0.115 Nucleic acid sequence=SEQ ID NO: 510 Amino acid sequence=SEQ ID NO: 1210; Antibody Heavy Chain No:77050 germ=IGHV1-2*02 seqid1=50.4 seqid3=49.2 thrd1=0.175 thrd3=0.188 divg=0.115 Nucleic acid sequence=SEQ ID NO: 511 Amino acid sequence=SEQ ID NO: 1211; Antibody Heavy Chain No:26431 germ=IGHV1-2*02 seqid1=46.3 seqid3=46.2 thrd1=0.187 thrd3=0.143 divg=0.115 Nucleic acid sequence=SEQ ID NO: 512 Amino acid sequence=SEQ ID NO: 1212; Antibody Heavy Chain No:138734 germ=IGHV1-2*02 seqid1=45.5 seqid3=37.7 thrd1=0.220 thrd3=0.247 divg=0.115 Nucleic acid sequence=SEQ ID NO: 513 Amino acid sequence=SEQ ID NO: 1213; Antibody Heavy Chain No:25677 germ=IGHV1-2*02 seqid1=50.4 seqid3=48.5 thrd1=0.122 thrd3=0.137 divg=0.115 Nucleic acid sequence=SEQ ID NO: 514 Amino acid sequence=SEQ ID NO: 1214; Antibody Heavy Chain No:11877 germ=IGHV1-2*02 seqid1=53.7 seqid3=50.8 thrd1=0.158 thrd3=0.114 divg=0.115 Nucleic acid sequence=SEQ ID NO: 515 Amino acid sequence=SEQ ID NO: 1215; Antibody Heavy Chain No:24914 germ=IGHV1-2*02 seqid1=48.8 seqid3=48.5 thrd1=0.191 thrd3=0.163 divg=0.111 Nucleic acid sequence=SEQ ID NO: 516 Amino acid sequence=SEQ ID NO: 1216; Antibody Heavy Chain No:66930 germ=IGHV1-2*02 seqid1=44.6 seqid3=43.8 thrd1=0.218 thrd3=0.191 divg=0.111 Nucleic acid sequence=SEQ ID NO: 517 Amino acid sequence=SEQ ID NO: 1217; Antibody Heavy Chain No:120736 germ=IGHV1-2*02 seqid1=51.2 seqid3=48.5 thrd1=0.158 thrd3=0.206 divg=0.111 Nucleic acid sequence=SEQ ID NO: 518 Amino acid sequence=SEQ ID NO: 1218; Antibody Heavy Chain No:74892 germ=IGHV1-2*02 seqid1=51.2 seqid3=52.3 thrd1=0.184 thrd3=0.161 divg=0.111 Nucleic acid sequence=SEQ ID NO: 519 Amino acid sequence=SEQ ID NO: 1219; Antibody Heavy Chain No:62366 germ=IGHV1-2*02 seqid1=52.1 seqid3=50.0 thrd1=0.183 thrd3=0.196 divg=0.111 Nucleic acid sequence=SEQ ID NO: 520 Amino acid sequence=SEQ ID NO: 1220; Antibody Heavy Chain No:2779 germ=IGHV1-2*02 seqid1=51.2 seqid3=49.2 thrd1=0.176 thrd3=0.168 divg=0.111 Nucleic acid sequence=SEQ ID NO: 521 Amino acid sequence=SEQ ID NO: 1221; Antibody Heavy Chain No:79804 germ=IGHV1-2*02 seqid1=50.4 seqid3=51.5 thrd1=0.197 thrd3=0.167 divg=0.111 Nucleic acid sequence=SEQ ID NO: 522 Amino acid sequence=SEQ ID NO: 1222; Antibody Heavy Chain No:26006 germ=IGHV1-2*02 seqid1=51.2 seqid3=52.3 thrd1=0.184 thrd3=0.161 divg=0.111 Nucleic acid sequence=SEQ ID NO: 523 Amino acid sequence=SEQ ID NO: 1223; Antibody Heavy Chain No:35261 germ=IGHV1-2*02 seqid1=52.1 seqid3=46.9 thrd1=0.156 thrd3=0.204 divg=0.111 Nucleic acid sequence=SEQ ID NO: 524 Amino acid sequence=SEQ ID NO: 1224; Antibody Heavy Chain No:32667 germ=IGHV1-2*02 seqid1=47.1 seqid3=47.7 thrd1=0.218 thrd3=0.142 divg=0.108 Nucleic acid sequence=SEQ ID NO: 525 Amino acid sequence=SEQ ID NO: 1225; Antibody Heavy Chain No:100962 germ=IGHV1-2*02 seqid1=51.2 seqid3=52.3 thrd1=0.185 thrd3=0.160 divg=0.108 Nucleic acid sequence=SEQ ID NO: 526 Amino acid sequence=SEQ ID NO: 1226; Antibody Heavy Chain No:162078 germ=IGHV1-2*02 seqid1=51.2 seqid3=52.3 thrd1=0.185 thrd3=0.160 divg=0.108 Nucleic acid sequence=SEQ ID NO: 527 Amino acid sequence=SEQ ID NO: 1227; Antibody Heavy Chain No:6353 germ=IGHV1-2*02 seqid1=51.2 seqid3=52.3 thrd1=0.185 thrd3=0.160 divg=0.108 Nucleic acid sequence=SEQ ID NO: 528 Amino acid sequence=SEQ ID NO: 1228; Antibody Heavy Chain No:52276 germ=IGHV1-2*02 seqid1=51.2 seqid3=52.3 thrd1=0.185 thrd3=0.160 divg=0.108 Nucleic acid sequence=SEQ ID NO: 529 Amino acid sequence=SEQ ID NO: 1229; Antibody Heavy Chain No:60197 germ=IGHV1-2*02 seqid1=47.1 seqid3=43.8 thrd1=0.149 thrd3=0.226 divg=0.108 Nucleic acid sequence=SEQ ID NO: 530 Amino acid sequence=SEQ ID NO: 1230; Antibody Heavy Chain No:59165 germ=IGHV1-2*02 seqid1=47.9 seqid3=49.2 thrd1=0.186 thrd3=0.164 divg=0.108 Nucleic acid sequence=SEQ ID NO: 531 Amino acid sequence=SEQ ID NO: 1231; Antibody Heavy Chain No:69714 germ=IGHV1-2*02 seqid1=53.7 seqid3=52.3 thrd1=0.156 thrd3=0.146 divg=0.108 Nucleic acid sequence=SEQ ID NO: 532 Amino acid sequence=SEQ ID NO: 1232; Antibody Heavy Chain No:19770 germ=IGHV1-2*02 seqid1=52.1 seqid3=51.5 thrd1=0.184 thrd3=0.159 divg=0.108 Nucleic acid sequence=SEQ ID NO: 533 Amino acid sequence=SEQ ID NO: 1233; Antibody Heavy Chain No:72439 germ=IGHV1-2*02 seqid1=47.9 seqid3=49.2 thrd1=0.184 thrd3=0.160 divg=0.108 Nucleic acid sequence=SEQ ID NO: 534 Amino acid sequence=SEQ ID NO: 1234; Antibody Heavy Chain No:22551 germ=IGHV1-2*02 seqid1=51.2 seqid3=50.0 thrd1=0.207 thrd3=0.177 divg=0.108 Nucleic acid sequence=SEQ ID NO: 535 Amino acid sequence=SEQ ID NO: 1235; Antibody Heavy Chain No:61263 germ=IGHV1-2*02 seqid1=51.2 seqid3=52.3 thrd1=0.185 thrd3=0.160 divg=0.108 Nucleic acid sequence=SEQ ID NO: 536 Amino acid sequence=SEQ ID NO: 1236; Antibody Heavy Chain No:40709 germ=IGHV1-2*02 seqid1=51.2 seqid3=52.3 thrd1=0.185 thrd3=0.160 divg=0.108 Nucleic acid sequence=SEQ ID NO: 537 Amino acid sequence=SEQ ID NO: 1237; Antibody Heavy Chain No:20145 germ=IGHV1-2*02 seqid1=52.1 seqid3=51.5 thrd1=0.184 thrd3=0.159 divg=0.108 Nucleic acid sequence=SEQ ID NO: 538 Amino acid sequence=SEQ ID NO: 1238; Antibody Heavy Chain No:150344 germ=IGHV1-2*02 seqid1=51.2 seqid3=48.5 thrd1=0.158 thrd3=0.206 divg=0.108 Nucleic acid sequence=SEQ ID NO: 539 Amino acid sequence=SEQ ID NO: 1239; Antibody Heavy Chain No:107592 germ=IGHV1-2*02 seqid1=52.1 seqid3=45.4 thrd1=0.123 thrd3=0.157 divg=0.108 Nucleic acid sequence=SEQ ID NO: 540 Amino acid sequence=SEQ ID NO: 1240; Antibody Heavy Chain No:35068 germ=IGHV1-2*02 seqid1=51.2 seqid3=52.3 thrd1=0.185 thrd3=0.160 divg=0.108 Nucleic acid sequence=SEQ ID NO: 541 Amino acid sequence=SEQ ID NO: 1241; Antibody Heavy Chain No:34274 germ=IGHV1-2*02 seqid1=51.2 seqid3=52.3 thrd1=0.185 thrd3=0.160 divg=0.108 Nucleic acid sequence=SEQ ID NO: 542 Amino acid sequence=SEQ ID NO: 1242; Antibody Heavy Chain No:44773 germ=IGHV1-2*02 seqid1=51.2 seqid3=52.3 thrd1=0.185 thrd3=0.160 divg=0.108 Nucleic acid sequence=SEQ ID NO: 543 Amino acid sequence=SEQ ID NO: 1243; Antibody Heavy Chain No:41319 germ=IGHV1-2*02 seqid1=48.8 seqid3=48.5 thrd1=0.206 thrd3=0.183 divg=0.108 Nucleic acid sequence=SEQ ID NO: 544 Amino acid sequence=SEQ ID NO: 1244; Antibody Heavy Chain No:42823 germ=IGHV1-2*02 seqid1=51.2 seqid3=48.5 thrd1=0.158 thrd3=0.206 divg=0.108 Nucleic acid sequence=SEQ ID NO: 545 Amino acid sequence=SEQ ID NO: 1245; Antibody Heavy Chain No:41670 germ=IGHV1-2*02 seqid1=55.4 seqid3=47.7 thrd1=0.124 thrd3=0.148 divg=0.108 Nucleic acid sequence=SEQ ID NO: 546 Amino acid sequence=SEQ ID NO: 1246; Antibody Heavy Chain No:45717 germ=IGHV1-2*02 seqid1=49.6 seqid3=46.9 thrd1=0.155 thrd3=0.206 divg=0.108 Nucleic acid sequence=SEQ ID NO: 547 Amino acid sequence=SEQ ID NO: 1247; Antibody Heavy Chain No:26052 germ=IGHV1-2*02 seqid1=51.2 seqid3=52.3 thrd1=0.185 thrd3=0.160 divg=0.108 Nucleic acid sequence=SEQ ID NO: 548 Amino acid sequence=SEQ ID NO: 1248; Antibody Heavy Chain No:96832 germ=IGHV1-2*02 seqid1=47.9 seqid3=45.4 thrd1=0.173 thrd3=0.258 divg=0.108 Nucleic acid sequence=SEQ ID NO: 549 Amino acid sequence=SEQ ID NO: 1249; Antibody Heavy Chain No:118499 germ=IGHV1-2*02 seqid1=49.6 seqid3=50.8 thrd1=0.185 thrd3=0.160 divg=0.108 Nucleic acid sequence=SEQ ID NO: 550 Amino acid sequence=SEQ ID NO: 1250; Antibody Heavy Chain No:38820 germ=IGHV1-2*02 seqid1=47.9 seqid3=49.2 thrd1=0.186 thrd3=0.164 divg=0.108 Nucleic acid sequence=SEQ ID NO: 551 Amino acid sequence=SEQ ID NO: 1251; Antibody Heavy Chain No:50301 germ=IGHV1-2*02 seqid1=51.2 seqid3=52.3 thrd1=0.185 thrd3=0.160 divg=0.108 Nucleic acid sequence=SEQ ID NO: 552 Amino acid sequence=SEQ ID NO: 1252; Antibody Heavy Chain No:18973 germ=IGHV1-2*02 seqid1=51.2 seqid3=52.3 thrd1=0.185 thrd3=0.160 divg=0.108 Nucleic acid sequence=SEQ ID NO: 553 Amino acid sequence=SEQ ID NO: 1253; Antibody Heavy Chain No:70392 germ=IGHV1-2*02 seqid1=52.1 seqid3=51.5 thrd1=0.184 thrd3=0.159 divg=0.108 Nucleic acid sequence=SEQ ID NO: 554 Amino acid sequence=SEQ ID NO: 1254; Antibody Heavy Chain No:85662 germ=IGHV1-2*02 seqid1=51.2 seqid3=52.3 thrd1=0.185 thrd3=0.160 divg=0.108 Nucleic acid sequence=SEQ ID NO: 555 Amino acid sequence=SEQ ID NO: 1255; Antibody Heavy Chain No:145143 germ=IGHV1-2*02 seqid1=51.2 seqid3=52.3 thrd1=0.185 thrd3=0.160 divg=0.108 Nucleic acid sequence=SEQ ID NO: 556 Amino acid sequence=SEQ ID NO: 1256; Antibody Heavy Chain No:138251 germ=IGHV1-2*02 seqid1=48.8 seqid3=46.9 thrd1=0.184 thrd3=0.237 divg=0.108 Nucleic acid sequence=SEQ ID NO: 557 Amino acid sequence=SEQ ID NO: 1257; Antibody Heavy Chain No:31587 germ=IGHV1-2*02 seqid1=51.2 seqid3=53.1 thrd1=0.297 thrd3=0.155 divg=0.108 Nucleic acid sequence=SEQ ID NO: 558 Amino acid sequence=SEQ ID NO: 1258; Antibody Heavy Chain No:62466 germ=IGHV1-2*02 seqid1=49.6 seqid3=48.5 thrd1=0.156 thrd3=0.218 divg=0.108 Nucleic acid sequence=SEQ ID NO: 559 Amino acid sequence=SEQ ID NO: 1259; Antibody Heavy Chain No:131429 germ=IGHV1-2*02 seqid1=51.2 seqid3=48.5 thrd1=0.158 thrd3=0.206 divg=0.108 Nucleic acid sequence=SEQ ID NO: 560 Amino acid sequence=SEQ ID NO: 1260; Antibody Heavy Chain No:44658 germ=IGHV1-2*02 seqid1=51.2 seqid3=47.7 thrd1=0.156 thrd3=0.207 divg=0.108 Nucleic acid sequence=SEQ ID NO: 561 Amino acid sequence=SEQ ID NO: 1261; Antibody Heavy Chain No:144844 germ=IGHV1-2*02 seqid1=51.2 seqid3=52.3 thrd1=0.185 thrd3=0.160 divg=0.108 Nucleic acid sequence=SEQ ID NO: 562 Amino acid sequence=SEQ ID NO: 1262; Antibody Heavy Chain No:44516 germ=IGHV1-2*02 seqid1=51.2 seqid3=48.5 thrd1=0.158 thrd3=0.206 divg=0.108 Nucleic acid sequence=SEQ ID NO: 563 Amino acid sequence=SEQ ID NO: 1263; Antibody Heavy Chain No:54766 germ=IGHV1-2*02 seqid1=52.1 seqid3=46.9 thrd1=0.199 thrd3=0.152 divg=0.105 Nucleic acid sequence=SEQ ID NO: 564 Amino acid sequence=SEQ ID NO: 1264; Antibody Heavy Chain No:76743 germ=IGHV1-2*02 seqid1=53.7 seqid3=49.2 thrd1=0.172 thrd3=0.194 divg=0.105 Nucleic acid sequence=SEQ ID NO: 565 Amino acid sequence=SEQ ID NO: 1265; Antibody Heavy Chain No:104654 germ=IGHV1-2*02 seqid1=47.9 seqid3=43.8 thrd1=0.169 thrd3=0.140 divg=0.105 Nucleic acid sequence=SEQ ID NO: 566 Amino acid sequence=SEQ ID NO: 1266; Antibody Heavy Chain No:124687 germ=IGHV1-2*02 seqid1=47.1 seqid3=48.5 thrd1=0.189 thrd3=0.166 divg=0.105 Nucleic acid sequence=SEQ ID NO: 567 Amino acid sequence=SEQ ID NO: 1267; Antibody Heavy Chain No:49649 germ=IGHV1-2*02 seqid1=53.7 seqid3=49.2 thrd1=0.171 thrd3=0.193 divg=0.105 Nucleic acid sequence=SEQ ID NO: 568 Amino acid sequence=SEQ ID NO: 1268; Antibody Heavy Chain No:74653 germ=IGHV1-2*02 seqid1=50.4 seqid3=49.2 thrd1=0.156 thrd3=0.148 divg=0.105 Nucleic acid sequence=SEQ ID NO: 569 Amino acid sequence=SEQ ID NO: 1269; Antibody Heavy Chain No:106878 germ=IGHV1-2*02 seqid1=49.6 seqid3=50.0 thrd1=0.186 thrd3=0.121 divg=0.105 Nucleic acid sequence=SEQ ID NO: 570 Amino acid sequence=SEQ ID NO: 1270; Antibody Heavy Chain No:86161 germ=IGHV1-2*02 seqid1=52.1 seqid3=54.6 thrd1=0.159 thrd3=0.133 divg=0.105 Nucleic acid sequence=SEQ ID NO: 571 Amino acid sequence=SEQ ID NO: 1271; Antibody Heavy Chain No:35923 germ=IGHV1-2*02 seqid1=51.2 seqid3=50.8 thrd1=0.173 thrd3=0.165 divg=0.105 Nucleic acid sequence=SEQ ID NO: 572 Amino acid sequence=SEQ ID NO: 1272; Antibody Heavy Chain No:76480 germ=IGHV1-2*02 seqid1=32.2 seqid3=36.2 thrd1=0.272 thrd3=0.301 divg=0.105 Nucleic acid sequence=SEQ ID NO: 573 Amino acid sequence=SEQ ID NO: 1273; Antibody Heavy Chain No:19179 germ=IGHV1-2*02 seqid1=52.1 seqid3=54.6 thrd1=0.159 thrd3=0.133 divg=0.105 Nucleic acid sequence=SEQ ID NO: 574 Amino acid sequence=SEQ ID NO: 1274; Antibody Heavy Chain No:42178 germ=IGHV1-2*02 seqid1=52.9 seqid3=50.8 thrd1=0.312 thrd3=0.189 divg=0.105 Nucleic acid sequence=SEQ ID NO: 575 Amino acid sequence=SEQ ID NO: 1275; Antibody Heavy Chain No:149342 germ=IGHV1-2*02 seqid1=52.1 seqid3=48.5 thrd1=0.170 thrd3=0.140 divg=0.101 Nucleic acid sequence=SEQ ID NO: 576 Amino acid sequence=SEQ ID NO: 1276; Antibody Heavy Chain No:12940 germ=IGHV1-2*02 seqid1=55.4 seqid3=52.3 thrd1=0.176 thrd3=0.131 divg=0.101 Nucleic acid sequence=SEQ ID NO: 577 Amino acid sequence=SEQ ID NO: 1277; Antibody Heavy Chain No:50102 germ=IGHV1-2*02 seqid1=54.5 seqid3=52.3 thrd1=0.176 thrd3=0.131 divg=0.101 Nucleic acid sequence=SEQ ID NO: 578 Amino acid sequence=SEQ ID NO: 1278; Antibody Heavy Chain No:57948 germ=IGHV1-2*02 seqid1=52.9 seqid3=54.6 thrd1=0.159 thrd3=0.136 divg=0.101 Nucleic acid sequence=SEQ ID NO: 579 Amino acid sequence=SEQ ID NO: 1279; Antibody Heavy Chain No:58689 germ=IGHV1-2*02 seqid1=55.4 seqid3=52.3 thrd1=0.176 thrd3=0.131 divg=0.101 Nucleic acid sequence=SEQ ID NO: 580 Amino acid sequence=SEQ ID NO: 1280; Antibody Heavy Chain No:67595 germ=IGHV1-2*02 seqid1=50.4 seqid3=49.2 thrd1=0.156 thrd3=0.148 divg=0.101 Nucleic acid sequence=SEQ ID NO: 581 Amino acid sequence=SEQ ID NO: 1281; Antibody Heavy Chain No:39805 germ=IGHV1-2*02 seqid1=54.5 seqid3=52.3 thrd1=0.176 thrd3=0.131 divg=0.101 Nucleic acid sequence=SEQ ID NO: 582 Amino acid sequence=SEQ ID NO: 1282; Antibody Heavy Chain No:8184 germ=IGHV1-2*02 seqid1=52.1 seqid3=49.2 thrd1=0.143 thrd3=0.104 divg=0.101 Nucleic acid sequence=SEQ ID NO: 583 Amino acid sequence=SEQ ID NO: 1283; Antibody Heavy Chain No:28484 germ=IGHV1-2*02 seqid1=46.3 seqid3=46.2 thrd1=0.173 thrd3=0.142 divg=0.101 Nucleic acid sequence=SEQ ID NO: 584 Amino acid sequence=SEQ ID NO: 1284; Antibody Heavy Chain No:94185 germ=IGHV1-2*02 seqid1=55.4 seqid3=52.3 thrd1=0.176 thrd3=0.131 divg=0.101 Nucleic acid sequence=SEQ ID NO: 585 Amino acid sequence=SEQ ID NO: 1285; Antibody Heavy Chain No:43787 germ=IGHV1-2*02 seqid1=52.1 seqid3=49.2 thrd1=0.174 thrd3=0.133 divg=0.101 Nucleic acid sequence=SEQ ID NO: 586 Amino acid sequence=SEQ ID NO: 1286; Antibody Heavy Chain No:83620 germ=IGHV1-2*02 seqid1=55.4 seqid3=53.8 thrd1=0.243 thrd3=0.147 divg=0.101 Nucleic acid sequence=SEQ ID NO: 587 Amino acid sequence=SEQ ID NO: 1287; Antibody Heavy Chain No:39478 germ=IGHV1-2*02 seqid1=55.4 seqid3=52.3 thrd1=0.176 thrd3=0.131 divg=0.101 Nucleic acid sequence=SEQ ID NO: 588 Amino acid sequence=SEQ ID NO: 1288; Antibody Heavy Chain No:131276 germ=IGHV1-2*02 seqid1=52.1 seqid3=48.5 thrd1=0.176 thrd3=0.135 divg=0.101 Nucleic acid sequence=SEQ ID NO: 589 Amino acid sequence=SEQ ID NO: 1289; Antibody Heavy Chain No:163473 germ=IGHV1-2*02 seqid1=50.4 seqid3=46.2 thrd1=0.220 thrd3=0.190 divg=0.101 Nucleic acid sequence=SEQ ID NO: 590 Amino acid sequence=SEQ ID NO: 1290; Antibody Heavy Chain No:56704 germ=IGHV1-2*02 seqid1=53.7 seqid3=51.5 thrd1=0.143 thrd3=0.121 divg=0.101 Nucleic acid sequence=SEQ ID NO: 591 Amino acid sequence=SEQ ID NO: 1291; Antibody Heavy Chain No:154264 germ=IGHV1-2*02 seqid1=54.5 seqid3=52.3 thrd1=0.176 thrd3=0.131 divg=0.101 Nucleic acid sequence=SEQ ID NO: 592 Amino acid sequence=SEQ ID NO: 1292; Antibody Heavy Chain No:158278 germ=IGHV1-2*02 seqid1=52.1 seqid3=47.7 thrd1=0.231 thrd3=0.132 divg=0.101 Nucleic acid sequence=SEQ ID NO: 593 Amino acid sequence=SEQ ID NO: 1293; Antibody Heavy Chain No:34490 germ=IGHV1-2*02 seqid1=51.2 seqid3=49.2 thrd1=0.162 thrd3=0.174 divg=0.101 Nucleic acid sequence=SEQ ID NO: 594 Amino acid sequence=SEQ ID NO: 1294; Antibody Heavy Chain No:77433 germ=IGHV1-2*02 seqid1=47.9 seqid3=47.7 thrd1=0.131 thrd3=0.140 divg=0.101 Nucleic acid sequence=SEQ ID NO: 595 Amino acid sequence=SEQ ID NO: 1295; Antibody Heavy Chain No:93604 germ=IGHV1-2*02 seqid1=51.2 seqid3=49.2 thrd1=0.159 thrd3=0.203 divg=0.098 Nucleic acid sequence=SEQ ID NO: 596 Amino acid sequence=SEQ ID NO: 1296; Antibody Heavy Chain No:165480 germ=IGHV1-2*02 seqid1=54.5 seqid3=50.0 thrd1=0.174 thrd3=0.195 divg=0.098 Nucleic acid sequence=SEQ ID NO: 597 Amino acid sequence=SEQ ID NO: 1297; Antibody Heavy Chain No:89337 germ=IGHV1-2*02 seqid1=50.4 seqid3=46.2 thrd1=0.191 thrd3=0.294 divg=0.098 Nucleic acid sequence=SEQ ID NO: 598 Amino acid sequence=SEQ ID NO: 1298; Antibody Heavy Chain No:141896 germ=IGHV1-2*02 seqid1=51.2 seqid3=50.0 thrd1=0.179 thrd3=0.189 divg=0.098 Nucleic acid sequence=SEQ ID NO: 599 Amino acid sequence=SEQ ID NO: 1299; Antibody Heavy Chain No:6626 germ=IGHV1-2*02 seqid1=54.5 seqid3=51.5 thrd1=0.178 thrd3=0.184 divg=0.098 Nucleic acid sequence=SEQ ID NO: 600 Amino acid sequence=SEQ ID NO: 1300;
Antibody Heavy Chain No:181213 germ=IGHV1-2*02 seqid1=52.1 seqid3=48.5 thrd1=0.174 thrd3=0.131 divg=0.098 Nucleic acid sequence=SEQ ID NO: 601 Amino acid sequence=SEQ ID NO: 1301; Antibody Heavy Chain No:22196 germ=IGHV1-2*02 seqid1=54.5 seqid3=50.0 thrd1=0.174 thrd3=0.195 divg=0.098 Nucleic acid sequence=SEQ ID NO: 602 Amino acid sequence=SEQ ID NO: 1302; Antibody Heavy Chain No:30474 germ=IGHV1-2*02 seqid1=54.5 seqid3=48.5 thrd1=0.242 thrd3=0.156 divg=0.098 Nucleic acid sequence=SEQ ID NO: 603 Amino acid sequence=SEQ ID NO: 1303; Antibody Heavy Chain No:125701 germ=IGHV1-2*02 seqid1=54.5 seqid3=47.7 thrd1=0.203 thrd3=0.190 divg=0.098 Nucleic acid sequence=SEQ ID NO: 604 Amino acid sequence=SEQ ID NO: 1304; Antibody Heavy Chain No:9945 germ=IGHV1-2*02 seqid1=56.2 seqid3=51.5 thrd1=0.160 thrd3=0.126 divg=0.098 Nucleic acid sequence=SEQ ID NO: 605 Amino acid sequence=SEQ ID NO: 1305; Antibody Heavy Chain No:40778 germ=IGHV1-2*02 seqid1=51.2 seqid3=47.7 thrd1=0.171 thrd3=0.176 divg=0.098 Nucleic acid sequence=SEQ ID NO: 606 Amino acid sequence=SEQ ID NO: 1306; Antibody Heavy Chain No:4513 germ=IGHV1-2*02 seqid1=52.9 seqid3=52.3 thrd1=0.170 thrd3=0.157 divg=0.098 Nucleic acid sequence=SEQ ID NO: 607 Amino acid sequence=SEQ ID NO: 1307; Antibody Heavy Chain No:134442 germ=IGHV1-2*02 seqid1=55.4 seqid3=53.8 thrd1=0.241 thrd3=0.155 divg=0.098 Nucleic acid sequence=SEQ ID NO: 608 Amino acid sequence=SEQ ID NO: 1308; Antibody Heavy Chain No:140333 germ=IGHV1-2*02 seqid1=56.2 seqid3=51.5 thrd1=0.171 thrd3=0.138 divg=0.098 Nucleic acid sequence=SEQ ID NO: 609 Amino acid sequence=SEQ ID NO: 1309; Antibody Heavy Chain No:105176 germ=IGHV1-2*02 seqid1=56.2 seqid3=52.3 thrd1=0.164 thrd3=0.121 divg=0.098 Nucleic acid sequence=SEQ ID NO: 610 Amino acid sequence=SEQ ID NO: 1310; Antibody Heavy Chain No:80243 germ=IGHV1-2*02 seqid1=54.5 seqid3=52.3 thrd1=0.176 thrd3=0.131 divg=0.098 Nucleic acid sequence=SEQ ID NO: 611 Amino acid sequence=SEQ ID NO: 1311; Antibody Heavy Chain No:9911 germ=IGHV1-2*02 seqid1=53.7 seqid3=52.3 thrd1=0.146 thrd3=0.136 divg=0.098 Nucleic acid sequence=SEQ ID NO: 612 Amino acid sequence=SEQ ID NO: 1312; Antibody Heavy Chain No:29294 germ=IGHV1-2*02 seqid1=55.4 seqid3=47.7 thrd1=0.159 thrd3=0.120 divg=0.098 Nucleic acid sequence=SEQ ID NO: 613 Amino acid sequence=SEQ ID NO: 1313; Antibody Heavy Chain No:34606 germ=IGHV1-2*02 seqid1=54.5 seqid3=52.3 thrd1=0.176 thrd3=0.131 divg=0.098 Nucleic acid sequence=SEQ ID NO: 614 Amino acid sequence=SEQ ID NO: 1314; Antibody Heavy Chain No:81062 germ=IGHV1-2*02 seqid1=55.4 seqid3=47.7 thrd1=0.159 thrd3=0.120 divg=0.095 Nucleic acid sequence=SEQ ID NO: 615 Amino acid sequence=SEQ ID NO: 1315; Antibody Heavy Chain No:57203 germ=IGHV1-2*02 seqid1=59.5 seqid3=52.3 thrd1=0.134 thrd3=0.180 divg=0.095 Nucleic acid sequence=SEQ ID NO: 616 Amino acid sequence=SEQ ID NO: 1316; Antibody Heavy Chain No:43280 germ=IGHV1-2*02 seqid1=54.5 seqid3=51.5 thrd1=0.181 thrd3=0.193 divg=0.095 Nucleic acid sequence=SEQ ID NO: 617 Amino acid sequence=SEQ ID NO: 1317; Antibody Heavy Chain No:115669 germ=IGHV1-2*02 seqid1=54.5 seqid3=51.5 thrd1=0.183 thrd3=0.139 divg=0.095 Nucleic acid sequence=SEQ ID NO: 618 Amino acid sequence=SEQ ID NO: 1318; Antibody Heavy Chain No:70426 germ=IGHV1-2*02 seqid1=53.7 seqid3=52.3 thrd1=0.144 thrd3=0.137 divg=0.095 Nucleic acid sequence=SEQ ID NO: 619 Amino acid sequence=SEQ ID NO: 1319; Antibody Heavy Chain No:72666 germ=IGHV1-2*02 seqid1=47.9 seqid3=45.4 thrd1=0.220 thrd3=0.242 divg=0.095 Nucleic acid sequence=SEQ ID NO: 620 Amino acid sequence=SEQ ID NO: 1320; Antibody Heavy Chain No:119442 germ=IGHV1-2*02 seqid1=43.0 seqid3=39.2 thrd1=0.250 thrd3=0.209 divg=0.095 Nucleic acid sequence=SEQ ID NO: 621 Amino acid sequence=SEQ ID NO: 1321; Antibody Heavy Chain No:143549 germ=IGHV1-2*02 seqid1=51.2 seqid3=48.5 thrd1=0.222 thrd3=0.280 divg=0.095 Nucleic acid sequence=SEQ ID NO: 622 Amino acid sequence=SEQ ID NO: 1322; Antibody Heavy Chain No:29700 germ=IGHV1-2*02 seqid1=49.6 seqid3=52.3 thrd1=0.160 thrd3=0.089 divg=0.095 Nucleic acid sequence=SEQ ID NO: 623 Amino acid sequence=SEQ ID NO: 1323; Antibody Heavy Chain No:28564 germ=IGHV1-2*02 seqid1=52.9 seqid3=49.2 thrd1=0.163 thrd3=0.124 divg=0.095 Nucleic acid sequence=SEQ ID NO: 624 Amino acid sequence=SEQ ID NO: 1324; Antibody Heavy Chain No:52736 germ=IGHV1-2*02 seqid1=54.5 seqid3=51.5 thrd1=0.181 thrd3=0.193 divg=0.095 Nucleic acid sequence=SEQ ID NO: 625 Amino acid sequence=SEQ ID NO: 1325; Antibody Heavy Chain No:105785 germ=IGHV1-2*02 seqid1=53.7 seqid3=52.3 thrd1=0.173 thrd3=0.188 divg=0.095 Nucleic acid sequence=SEQ ID NO: 626 Amino acid sequence=SEQ ID NO: 1326; Antibody Heavy Chain No:12559 germ=IGHV1-2*02 seqid1=49.6 seqid3=52.3 thrd1=0.160 thrd3=0.089 divg=0.095 Nucleic acid sequence=SEQ ID NO: 627 Amino acid sequence=SEQ ID NO: 1327; Antibody Heavy Chain No:126568 germ=IGHV1-2*02 seqid1=56.2 seqid3=52.3 thrd1=0.164 thrd3=0.121 divg=0.095 Nucleic acid sequence=SEQ ID NO: 628 Amino acid sequence=SEQ ID NO: 1328; Antibody Heavy Chain No:93926 germ=IGHV1-2*02 seqid1=49.6 seqid3=52.3 thrd1=0.160 thrd3=0.089 divg=0.095 Nucleic acid sequence=SEQ ID NO: 629 Amino acid sequence=SEQ ID NO: 1329; Antibody Heavy Chain No:50697 germ=IGHV1-2*02 seqid1=49.6 seqid3=52.3 thrd1=0.160 thrd3=0.089 divg=0.095 Nucleic acid sequence=SEQ ID NO: 630 Amino acid sequence=SEQ ID NO: 1330; Antibody Heavy Chain No:44028 germ=IGHV1-2*02 seqid1=53.7 seqid3=51.5 thrd1=0.148 thrd3=0.120 divg=0.095 Nucleic acid sequence=SEQ ID NO: 631 Amino acid sequence=SEQ ID NO: 1331; Antibody Heavy Chain No:43578 germ=IGHV1-2*02 seqid1=55.4 seqid3=51.5 thrd1=0.171 thrd3=0.190 divg=0.095 Nucleic acid sequence=SEQ ID NO: 632 Amino acid sequence=SEQ ID NO: 1332; Antibody Heavy Chain No:41655 germ=IGHV1-2*02 seqid1=51.2 seqid3=48.5 thrd1=0.180 thrd3=0.193 divg=0.095 Nucleic acid sequence=SEQ ID NO: 633 Amino acid sequence=SEQ ID NO: 1333; Antibody Heavy Chain No:74815 germ=IGHV1-2*02 seqid1=55.4 seqid3=50.8 thrd1=0.173 thrd3=0.193 divg=0.095 Nucleic acid sequence=SEQ ID NO: 634 Amino acid sequence=SEQ ID NO: 1334; Antibody Heavy Chain No:8194 germ=IGHV1-2*02 seqid1=38.0 seqid3=39.2 thrd1=0.235 thrd3=0.238 divg=0.095 Nucleic acid sequence=SEQ ID NO: 635 Amino acid sequence=SEQ ID NO: 1335; Antibody Heavy Chain No:141541 germ=IGHV1-2*02 seqid1=50.4 seqid3=50.8 thrd1=0.167 thrd3=0.213 divg=0.095 Nucleic acid sequence=SEQ ID NO: 636 Amino acid sequence=SEQ ID NO: 1336; Antibody Heavy Chain No:24104 germ=IGHV1-2*02 seqid1=50.4 seqid3=49.2 thrd1=0.177 thrd3=0.145 divg=0.095 Nucleic acid sequence=SEQ ID NO: 637 Amino acid sequence=SEQ ID NO: 1337; Antibody Heavy Chain No:38838 germ=IGHV1-2*02 seqid1=55.4 seqid3=52.3 thrd1=0.166 thrd3=0.121 divg=0.095 Nucleic acid sequence=SEQ ID NO: 638 Amino acid sequence=SEQ ID NO: 1338; Antibody Heavy Chain No:17924 germ=IGHV1-2*02 seqid1=52.1 seqid3=46.9 thrd1=0.227 thrd3=0.194 divg=0.095 Nucleic acid sequence=SEQ ID NO: 639 Amino acid sequence=SEQ ID NO: 1339; Antibody Heavy Chain No:13341 germ=IGHV1-2*02 seqid1=52.9 seqid3=47.7 thrd1=0.122 thrd3=0.145 divg=0.095 Nucleic acid sequence=SEQ ID NO: 640 Amino acid sequence=SEQ ID NO: 1340; Antibody Heavy Chain No:35429 germ=IGHV1-2*02 seqid1=53.7 seqid3=52.3 thrd1=0.173 thrd3=0.188 divg=0.095 Nucleic acid sequence=SEQ ID NO: 641 Amino acid sequence=SEQ ID NO: 1341; Antibody Heavy Chain No:34820 germ=IGHV1-2*02 seqid1=55.4 seqid3=51.5 thrd1=0.178 thrd3=0.133 divg=0.095 Nucleic acid sequence=SEQ ID NO: 642 Amino acid sequence=SEQ ID NO: 1342; Antibody Heavy Chain No:65892 germ=IGHV1-2*02 seqid1=55.4 seqid3=52.3 thrd1=0.167 thrd3=0.122 divg=0.095 Nucleic acid sequence=SEQ ID NO: 643 Amino acid sequence=SEQ ID NO: 1343; Antibody Heavy Chain No:51501 germ=IGHV1-2*02 seqid1=51.2 seqid3=47.7 thrd1=0.144 thrd3=0.104 divg=0.095 Nucleic acid sequence=SEQ ID NO: 644 Amino acid sequence=SEQ ID NO: 1344; Antibody Heavy Chain No:98150 germ=IGHV1-2*02 seqid1=53.7 seqid3=45.4 thrd1=0.117 thrd3=0.140 divg=0.095 Nucleic acid sequence=SEQ ID NO: 645 Amino acid sequence=SEQ ID NO: 1345; Antibody Heavy Chain No:12243 germ=IGHV1-2*02 seqid1=48.8 seqid3=49.2 thrd1=0.206 thrd3=0.139 divg=0.095 Nucleic acid sequence=SEQ ID NO: 646 Amino acid sequence=SEQ ID NO: 1346; Antibody Heavy Chain No:77718 germ=IGHV1-2*02 seqid1=55.4 seqid3=52.3 thrd1=0.178 thrd3=0.133 divg=0.095 Nucleic acid sequence=SEQ ID NO: 647 Amino acid sequence=SEQ ID NO: 1347; Antibody Heavy Chain No:32593 germ=IGHV1-2*02 seqid1=52.1 seqid3=46.9 thrd1=0.122 thrd3=0.145 divg=0.095 Nucleic acid sequence=SEQ ID NO: 648 Amino acid sequence=SEQ ID NO: 1348; Antibody Heavy Chain No:32228 germ=IGHV1-2*02 seqid1=55.4 seqid3=50.8 thrd1=0.173 thrd3=0.193 divg=0.095 Nucleic acid sequence=SEQ ID NO: 649 Amino acid sequence=SEQ ID NO: 1349; Antibody Heavy Chain No:8376 germ=IGHV1-2*02 seqid1=49.6 seqid3=50.0 thrd1=0.163 thrd3=0.205 divg=0.091 Nucleic acid sequence=SEQ ID NO: 650 Amino acid sequence=SEQ ID NO: 1350; Antibody Heavy Chain No:81308 germ=IGHV1-2*02 seqid1=50.4 seqid3=49.2 thrd1=0.157 thrd3=0.145 divg=0.091 Nucleic acid sequence=SEQ ID NO: 651 Amino acid sequence=SEQ ID NO: 1351; Antibody Heavy Chain No:11518 germ=IGHV1-2*02 seqid1=48.8 seqid3=48.5 thrd1=0.126 thrd3=0.141 divg=0.091 Nucleic acid sequence=SEQ ID NO: 652 Amino acid sequence=SEQ ID NO: 1352; Antibody Heavy Chain No:73361 germ=IGHV1-2*02 seqid1=54.5 seqid3=51.5 thrd1=0.181 thrd3=0.134 divg=0.091 Nucleic acid sequence=SEQ ID NO: 653 Amino acid sequence=SEQ ID NO: 1353; Antibody Heavy Chain No:32234 germ=IGHV1-2*02 seqid1=56.2 seqid3=52.3 thrd1=0.164 thrd3=0.121 divg=0.091 Nucleic acid sequence=SEQ ID NO: 654 Amino acid sequence=SEQ ID NO: 1354; Antibody Heavy Chain No:22598 germ=IGHV1-2*02 seqid1=51.2 seqid3=49.2 thrd1=0.218 thrd3=0.142 divg=0.091 Nucleic acid sequence=SEQ ID NO: 655 Amino acid sequence=SEQ ID NO: 1355; Antibody Heavy Chain No:82491 germ=IGHV1-2*02 seqid1=55.4 seqid3=50.8 thrd1=0.209 thrd3=0.100 divg=0.091 Nucleic acid sequence=SEQ ID NO: 656 Amino acid sequence=SEQ ID NO: 1356; Antibody Heavy Chain No:22197 germ=IGHV1-2*02 seqid1=50.4 seqid3=46.9 thrd1=0.171 thrd3=0.177 divg=0.091 Nucleic acid sequence=SEQ ID NO: 657 Amino acid sequence=SEQ ID NO: 1357; Antibody Heavy Chain No:22110 germ=IGHV1-2*02 seqid1=52.9 seqid3=49.2 thrd1=0.198 thrd3=0.154 divg=0.091 Nucleic acid sequence=SEQ ID NO: 658 Amino acid sequence=SEQ ID NO: 1358; Antibody Heavy Chain No:10233 germ=IGHV1-2*02 seqid1=55.4 seqid3=52.3 thrd1=0.176 thrd3=0.131 divg=0.091 Nucleic acid sequence=SEQ ID NO: 659 Amino acid sequence=SEQ ID NO: 1359; Antibody Heavy Chain No:59890 germ=IGHV1-2*02 seqid1=55.4 seqid3=52.3 thrd1=0.176 thrd3=0.131 divg=0.091 Nucleic acid sequence=SEQ ID NO: 660 Amino acid sequence=SEQ ID NO: 1360; Antibody Heavy Chain No:72262 germ=IGHV1-2*02 seqid1=38.0 seqid3=43.1 thrd1=0.331 thrd3=0.259 divg=0.091 Nucleic acid sequence=SEQ ID NO: 661 Amino acid sequence=SEQ ID NO: 1361; Antibody Heavy Chain No:101709 germ=IGHV1-2*02 seqid1=52.1 seqid3=47.7 thrd1=0.143 thrd3=0.103 divg=0.091 Nucleic acid sequence=SEQ ID NO: 662 Amino acid sequence=SEQ ID NO: 1362; Antibody Heavy Chain No:64491 germ=IGHV1-2*02 seqid1=56.2 seqid3=52.3 thrd1=0.164 thrd3=0.121 divg=0.091 Nucleic acid sequence=SEQ ID NO: 663 Amino acid sequence=SEQ ID NO: 1363; Antibody Heavy Chain No:68980 germ=IGHV1-2*02 seqid1=56.2 seqid3=51.5 thrd1=0.158 thrd3=0.138 divg=0.091 Nucleic acid sequence=SEQ ID NO: 664 Amino acid sequence=SEQ ID NO: 1364; Antibody Heavy Chain No:106681 germ=IGHV1-2*02 seqid1=53.7 seqid3=51.5 thrd1=0.148 thrd3=0.120 divg=0.091 Nucleic acid sequence=SEQ ID NO: 665 Amino acid sequence=SEQ ID NO: 1365; Antibody Heavy Chain No:9252 germ=IGHV1-2*02 seqid1=52.1 seqid3=49.2 thrd1=0.161 thrd3=0.151 divg=0.091 Nucleic acid sequence=SEQ ID NO: 666 Amino acid sequence=SEQ ID NO: 1366; Antibody Heavy Chain No:9061 germ=IGHV1-2*02 seqid1=55.4 seqid3=52.3 thrd1=0.176 thrd3=0.131 divg=0.091 Nucleic acid sequence=SEQ ID NO: 667 Amino acid sequence=SEQ ID NO: 1367; Antibody Heavy Chain No:47729 germ=IGHV1-2*02 seqid1=55.4 seqid3=52.3 thrd1=0.176 thrd3=0.131 divg=0.091 Nucleic acid sequence=SEQ ID NO: 668 Amino acid sequence=SEQ ID NO: 1368; Antibody Heavy Chain No:61890 germ=IGHV1-2*02 seqid1=51.2 seqid3=49.2 thrd1=0.147 thrd3=0.119 divg=0.091 Nucleic acid sequence=SEQ ID NO: 669 Amino acid sequence=SEQ ID NO: 1369; Antibody Heavy Chain No:44167 germ=IGHV1-2*02 seqid1=53.7 seqid3=51.5 thrd1=0.148 thrd3=0.120 divg=0.091 Nucleic acid sequence=SEQ ID NO: 670 Amino acid sequence=SEQ ID NO: 1370; Antibody Heavy Chain No:88530 germ=IGHV1-2*02 seqid1=33.1 seqid3=35.4 thrd1=0.208 thrd3=0.361 divg=0.091 Nucleic acid sequence=SEQ ID NO: 671 Amino acid sequence=SEQ ID NO: 1371; Antibody Heavy Chain No:113877 germ=IGHV1-2*02 seqid1=41.3 seqid3=42.3 thrd1=0.277 thrd3=0.259 divg=0.091 Nucleic acid sequence=SEQ ID NO: 672 Amino acid sequence=SEQ ID NO: 1372; Antibody Heavy Chain No:14850 germ=IGHV1-2*02 seqid1=54.5 seqid3=51.5 thrd1=0.181 thrd3=0.134 divg=0.091 Nucleic acid sequence=SEQ ID NO: 673 Amino acid sequence=SEQ ID NO: 1373; Antibody Heavy Chain No:35041 germ=IGHV1-2*02 seqid1=54.5 seqid3=51.5 thrd1=0.181 thrd3=0.134 divg=0.091 Nucleic acid sequence=SEQ ID NO: 674 Amino acid sequence=SEQ ID NO: 1374; Antibody Heavy Chain No:33864 germ=IGHV1-2*02 seqid1=56.2 seqid3=52.3 thrd1=0.164 thrd3=0.121 divg=0.091 Nucleic acid sequence=SEQ ID NO: 675 Amino acid sequence=SEQ ID NO: 1375; Antibody Heavy Chain No:10721 germ=IGHV1-2*02 seqid1=54.5 seqid3=51.5 thrd1=0.181 thrd3=0.134 divg=0.091 Nucleic acid sequence=SEQ ID NO: 676 Amino acid sequence=SEQ ID NO: 1376; Antibody Heavy Chain No:100562 germ=IGHV1-2*02 seqid1=55.4 seqid3=52.3 thrd1=0.176 thrd3=0.131 divg=0.091 Nucleic acid sequence=SEQ ID NO: 677 Amino acid sequence=SEQ ID NO: 1377; Antibody Heavy Chain No:54476 germ=IGHV1-2*02 seqid1=54.5 seqid3=51.5 thrd1=0.181 thrd3=0.134 divg=0.091 Nucleic acid sequence=SEQ ID NO: 678 Amino acid sequence=SEQ ID NO: 1378; Antibody Heavy Chain No:22270 germ=IGHV1-2*02 seqid1=52.1 seqid3=49.2 thrd1=0.176 thrd3=0.135 divg=0.091 Nucleic acid sequence=SEQ ID NO: 679 Amino acid sequence=SEQ ID NO: 1379; Antibody Heavy Chain No:115874 germ=IGHV1-2*02 seqid1=55.4 seqid3=52.3 thrd1=0.176 thrd3=0.131 divg=0.091 Nucleic acid sequence=SEQ ID NO: 680 Amino acid sequence=SEQ ID NO: 1380; Antibody Heavy Chain No:87027 germ=IGHV1-2*02 seqid1=52.1 seqid3=48.5 thrd1=0.204 thrd3=0.144 divg=0.091 Nucleic acid sequence=SEQ ID NO: 681 Amino acid sequence=SEQ ID NO: 1381; Antibody Heavy Chain No:35015 germ=IGHV1-2*02 seqid1=55.4 seqid3=52.3 thrd1=0.176 thrd3=0.131 divg=0.091 Nucleic acid sequence=SEQ ID NO: 682 Amino acid sequence=SEQ ID NO: 1382; Antibody Heavy Chain No:148767 germ=IGHV1-2*02 seqid1=55.4 seqid3=52.3 thrd1=0.176 thrd3=0.131 divg=0.091 Nucleic acid sequence=SEQ ID NO: 683 Amino acid sequence=SEQ ID NO: 1383; Antibody Heavy Chain No:28267 germ=IGHV1-2*02 seqid1=50.4 seqid3=46.2 thrd1=0.195 thrd3=0.213 divg=0.088 Nucleic acid sequence=SEQ ID NO: 684 Amino acid sequence=SEQ ID NO: 1384; Antibody Heavy Chain No:63967 germ=IGHV1-2*02 seqid1=48.8 seqid3=46.9 thrd1=0.193 thrd3=0.176 divg=0.088 Nucleic acid sequence=SEQ ID NO: 685 Amino acid sequence=SEQ ID NO: 1385; Antibody Heavy Chain No:23404 germ=IGHV1-2*02 seqid1=50.4 seqid3=50.8 thrd1=0.146 thrd3=0.134 divg=0.088 Nucleic acid sequence=SEQ ID NO: 686 Amino acid sequence=SEQ ID NO: 1386; Antibody Heavy Chain No:137385 germ=IGHV1-2*02 seqid1=52.9 seqid3=50.8 thrd1=0.188 thrd3=0.184 divg=0.088 Nucleic acid sequence=SEQ ID NO: 687 Amino acid sequence=SEQ ID NO: 1387; Antibody Heavy Chain No:24631 germ=IGHV1-2*02 seqid1=54.5 seqid3=53.1 thrd1=0.147 thrd3=0.136 divg=0.088 Nucleic acid sequence=SEQ ID NO: 688 Amino acid sequence=SEQ ID NO: 1388; Antibody Heavy Chain No:79562 germ=IGHV1-2*02 seqid1=51.2 seqid3=50.8 thrd1=0.169 thrd3=0.131 divg=0.088 Nucleic acid sequence=SEQ ID NO: 689 Amino acid sequence=SEQ ID NO: 1389; Antibody Heavy Chain No:26114 germ=IGHV1-2*02 seqid1=51.2 seqid3=50.8 thrd1=0.169 thrd3=0.131 divg=0.088 Nucleic acid sequence=SEQ ID NO: 690 Amino acid sequence=SEQ ID NO: 1390; Antibody Heavy Chain No:66679 germ=IGHV1-2*02 seqid1=53.7 seqid3=50.8 thrd1=0.169 thrd3=0.162 divg=0.088 Nucleic acid sequence=SEQ ID NO: 691 Amino acid sequence=SEQ ID NO: 1391; Antibody Heavy Chain No:65060 germ=IGHV1-2*02 seqid1=54.5 seqid3=53.1 thrd1=0.147 thrd3=0.136 divg=0.088 Nucleic acid sequence=SEQ ID NO: 692 Amino acid sequence=SEQ ID NO: 1392; Antibody Heavy Chain No:21715 germ=IGHV1-2*02 seqid1=55.4 seqid3=53.8 thrd1=0.243 thrd3=0.131 divg=0.088 Nucleic acid sequence=SEQ ID NO: 693 Amino acid sequence=SEQ ID NO: 1393; Antibody Heavy Chain No:81335 germ=IGHV1-2*02 seqid1=52.1 seqid3=48.5 thrd1=0.139 thrd3=0.109 divg=0.088 Nucleic acid sequence=SEQ ID NO: 694 Amino acid sequence=SEQ ID NO: 1394; Antibody Heavy Chain No:19816 germ=IGHV1-2*02 seqid1=54.5 seqid3=53.1 thrd1=0.147 thrd3=0.136 divg=0.088 Nucleic acid sequence=SEQ ID NO: 695 Amino acid sequence=SEQ ID NO: 1395; Antibody Heavy Chain No:21088 germ=IGHV1-2*02 seqid1=51.2 seqid3=50.8 thrd1=0.169 thrd3=0.131 divg=0.088 Nucleic acid sequence=SEQ ID NO: 696 Amino acid sequence=SEQ ID NO: 1396; Antibody Heavy Chain No:20584 germ=IGHV1-2*02 seqid1=54.5 seqid3=53.1 thrd1=0.147 thrd3=0.136 divg=0.088 Nucleic acid sequence=SEQ ID NO: 697 Amino acid sequence=SEQ ID NO: 1397; Antibody Heavy Chain No:55431 germ=IGHV1-2*02 seqid1=51.2 seqid3=50.8 thrd1=0.169 thrd3=0.131 divg=0.088 Nucleic acid sequence=SEQ ID NO: 698 Amino acid sequence=SEQ ID NO: 1398; Antibody Heavy Chain No:27745 germ=IGHV1-2*02 seqid1=51.2 seqid3=51.5 thrd1=0.197 thrd3=0.286 divg=0.088 Nucleic acid sequence=SEQ ID NO: 699 Amino acid sequence=SEQ ID NO: 1399; Antibody Heavy Chain No:27991 germ=IGHV1-2*02 seqid1=47.9 seqid3=46.2 thrd1=0.173 thrd3=0.137 divg=0.088 Nucleic acid sequence=SEQ ID NO: 700 Amino acid sequence=SEQ ID NO: 1400; Antibody Heavy Chain No:53541 germ=IGHV1-2*02 seqid1=53.7 seqid3=50.8 thrd1=0.169 thrd3=0.162 divg=0.088 Nucleic acid sequence=SEQ ID NO: 701 Amino acid sequence=SEQ ID NO: 1401; Antibody Heavy Chain No:15670 germ=IGHV1-2*02 seqid1=49.6 seqid3=50.0 thrd1=0.125 thrd3=0.170 divg=0.088 Nucleic acid sequence=SEQ ID NO: 702 Amino acid sequence=SEQ ID NO: 1402; Antibody Heavy Chain No:46476 germ=IGHV1-2*02 seqid1=55.4 seqid3=53.1 thrd1=0.148 thrd3=0.136 divg=0.088 Nucleic acid sequence=SEQ ID NO: 703 Amino acid sequence=SEQ ID NO: 1403; Antibody Heavy Chain No:41234 germ=IGHV1-2*02 seqid1=54.5 seqid3=50.8 thrd1=0.162 thrd3=0.120 divg=0.088 Nucleic acid sequence=SEQ ID NO: 704 Amino acid sequence=SEQ ID NO: 1404; Antibody Heavy Chain No:26766 germ=IGHV1-2*02 seqid1=52.1 seqid3=48.5 thrd1=0.139 thrd3=0.109 divg=0.088 Nucleic acid sequence=SEQ ID NO: 705 Amino acid sequence=SEQ ID NO: 1405; Antibody Heavy Chain No:34607 germ=IGHV1-2*02 seqid1=50.4 seqid3=46.2 thrd1=0.177 thrd3=0.095 divg=0.088 Nucleic acid sequence=SEQ ID NO: 706 Amino acid sequence=SEQ ID NO: 1406; Antibody Heavy Chain No:38262 germ=IGHV1-2*02 seqid1=51.2 seqid3=50.0 thrd1=0.153 thrd3=0.176 divg=0.088 Nucleic acid sequence=SEQ ID NO: 707 Amino acid sequence=SEQ ID NO: 1407; Antibody Heavy Chain No:2032 germ=IGHV1-2*02 seqid1=51.2 seqid3=50.8 thrd1=0.169 thrd3=0.131 divg=0.088 Nucleic acid sequence=SEQ ID NO: 708 Amino acid sequence=SEQ ID NO: 1408; Antibody Heavy Chain No:133700 germ=IGHV1-2*02 seqid1=52.9 seqid3=50.0 thrd1=0.195 thrd3=0.162 divg=0.088 Nucleic acid sequence=SEQ ID NO: 709 Amino acid sequence=SEQ ID NO: 1409; Antibody Heavy Chain No:36987 germ=IGHV1-2*02 seqid1=54.5 seqid3=53.1 thrd1=0.147 thrd3=0.136 divg=0.088 Nucleic acid sequence=SEQ ID NO: 710 Amino acid sequence=SEQ ID NO: 1410; Antibody Heavy Chain No:36221 germ=IGHV1-2*02 seqid1=48.8 seqid3=48.5 thrd1=0.160 thrd3=0.166 divg=0.088 Nucleic acid sequence=SEQ ID NO: 711 Amino acid sequence=SEQ ID NO: 1411; Antibody Heavy Chain No:24266 germ=IGHV1-2*02 seqid1=54.5 seqid3=53.1 thrd1=0.147 thrd3=0.136 divg=0.088 Nucleic acid sequence=SEQ ID NO: 712 Amino acid sequence=SEQ ID NO: 1412; Antibody Heavy Chain No:51353 germ=IGHV1-2*02 seqid1=51.2 seqid3=50.8 thrd1=0.166 thrd3=0.186 divg=0.088 Nucleic acid sequence=SEQ ID NO: 713 Amino acid sequence=SEQ ID NO: 1413; Antibody Heavy Chain No:59427 germ=IGHV1-2*02 seqid1=51.2 seqid3=47.7 thrd1=0.140 thrd3=0.110 divg=0.088 Nucleic acid sequence=SEQ ID NO: 714 Amino acid sequence=SEQ ID NO: 1414; Antibody Heavy Chain No:9160 germ=IGHV1-2*02 seqid1=50.4 seqid3=47.7 thrd1=0.165 thrd3=0.138 divg=0.088 Nucleic acid sequence=SEQ ID NO: 715 Amino acid sequence=SEQ ID NO: 1415; Antibody Heavy Chain No:113616 germ=IGHV1-2*02 seqid1=29.8 seqid3=36.9 thrd1=0.366 thrd3=0.302 divg=0.088 Nucleic acid sequence=SEQ ID NO: 716 Amino acid sequence=SEQ ID NO: 1416; Antibody Heavy Chain No:20929 germ=IGHV1-24*01 seqid1=47.9 seqid3=47.7 thrd1=0.203 thrd3=0.175 divg=0.088 Nucleic acid sequence=SEQ ID NO: 717 Amino acid sequence=SEQ ID NO: 1417; Antibody Heavy Chain No:108561 germ=IGHV1-2*02 seqid1=51.2 seqid3=48.5 thrd1=0.142 thrd3=0.108 divg=0.084 Nucleic acid sequence=SEQ ID NO: 718 Amino acid sequence=SEQ ID NO: 1418; Antibody Heavy Chain No:10295 germ=IGHV1-24*01 seqid1=47.9 seqid3=46.9 thrd1=0.215 thrd3=0.184 divg=0.084 Nucleic acid sequence=SEQ ID NO: 719 Amino acid sequence=SEQ ID NO: 1419; Antibody Heavy Chain No:5982 germ=IGHV1-2*02 seqid1=56.2 seqid3=50.0 thrd1=0.198 thrd3=0.148 divg=0.084 Nucleic acid sequence=SEQ ID NO: 720 Amino acid sequence=SEQ ID NO: 1420; Antibody Heavy Chain No:102928 germ=IGHV1-2*02 seqid1=53.7 seqid3=51.5 thrd1=0.170 thrd3=0.182 divg=0.084 Nucleic acid sequence=SEQ ID NO: 721 Amino acid sequence=SEQ ID NO: 1421; Antibody Heavy Chain No:63623 germ=IGHV1-2*02 seqid1=52.9 seqid3=48.5 thrd1=0.171 thrd3=0.177 divg=0.084 Nucleic acid sequence=SEQ ID NO: 722 Amino acid sequence=SEQ ID NO: 1422; Antibody Heavy Chain No:20898 germ=IGHV1-2*02 seqid1=52.9 seqid3=51.5 thrd1=0.153 thrd3=0.159 divg=0.084 Nucleic acid sequence=SEQ ID NO: 723 Amino acid sequence=SEQ ID NO: 1423; Antibody Heavy Chain No:55760 germ=IGHV1-24*01 seqid1=47.1 seqid3=47.7 thrd1=0.194 thrd3=0.153 divg=0.084 Nucleic acid sequence=SEQ ID NO: 724 Amino acid sequence=SEQ ID NO: 1424; Antibody Heavy Chain No:43527 germ=IGHV1-2*02 seqid1=47.9 seqid3=47.7 thrd1=0.143 thrd3=0.132 divg=0.084 Nucleic acid sequence=SEQ ID NO: 725 Amino acid sequence=SEQ ID NO: 1425; Antibody Heavy Chain No:82760 germ=IGHV1-2*02 seqid1=53.7 seqid3=51.5 thrd1=0.170 thrd3=0.182 divg=0.084 Nucleic acid sequence=SEQ ID NO: 726 Amino acid sequence=SEQ ID NO: 1426; Antibody Heavy Chain No:46807 germ=IGHV1-2*02 seqid1=53.7 seqid3=52.3 thrd1=0.243 thrd3=0.131 divg=0.084 Nucleic acid sequence=SEQ ID NO: 727 Amino acid sequence=SEQ ID NO: 1427; Antibody Heavy Chain No:17702 germ=IGHV1-2*02 seqid1=52.9 seqid3=48.5 thrd1=0.129 thrd3=0.165 divg=0.084 Nucleic acid sequence=SEQ ID NO: 728 Amino acid sequence=SEQ ID NO: 1428; Antibody Heavy Chain No:83355 germ=IGHV1-2*02 seqid1=50.4 seqid3=46.9 thrd1=0.148 thrd3=0.127 divg=0.084 Nucleic acid sequence=SEQ ID NO: 729 Amino acid sequence=SEQ ID NO: 1429; Antibody Heavy Chain No:94471 germ=IGHV1-2*02 seqid1=52.1 seqid3=50.8 thrd1=0.171 thrd3=0.084 divg=0.084 Nucleic acid sequence=SEQ ID NO: 730 Amino acid sequence=SEQ ID NO: 1430; Antibody Heavy Chain No:8425 germ=IGHV1-2*02 seqid1=52.9 seqid3=48.5 thrd1=0.170 thrd3=0.137 divg=0.084 Nucleic acid sequence=SEQ ID NO: 731 Amino acid sequence=SEQ ID NO: 1431; Antibody Heavy Chain No:54065 germ=IGHV1-2*02 seqid1=46.3 seqid3=44.6 thrd1=0.205 thrd3=0.131 divg=0.084 Nucleic acid sequence=SEQ ID NO: 732 Amino acid sequence=SEQ ID NO: 1432; Antibody Heavy Chain No:154038 germ=IGHV1-2*02 seqid1=51.2 seqid3=48.5 thrd1=0.257 thrd3=0.285 divg=0.084 Nucleic acid sequence=SEQ ID NO: 733 Amino acid sequence=SEQ ID NO: 1433; Antibody Heavy Chain No:31030 germ=IGHV1-2*02 seqid1=52.1 seqid3=47.7 thrd1=0.172 thrd3=0.167 divg=0.084 Nucleic acid sequence=SEQ ID NO: 734 Amino acid sequence=SEQ ID NO: 1434; Antibody Heavy Chain No:6964 germ=IGHV1-2*02 seqid1=51.2 seqid3=51.5 thrd1=0.140 thrd3=0.136 divg=0.084 Nucleic acid sequence=SEQ ID NO: 735 Amino acid sequence=SEQ ID NO: 1435; Antibody Heavy Chain No:94801 germ=IGHV1-2*02 seqid1=54.5 seqid3=51.5 thrd1=0.167 thrd3=0.209 divg=0.084 Nucleic acid sequence=SEQ ID NO: 736 Amino acid sequence=SEQ ID NO: 1436; Antibody Heavy Chain No:54498 germ=IGHV1-2*02 seqid1=54.5 seqid3=52.3 thrd1=0.166 thrd3=0.208 divg=0.084 Nucleic acid sequence=SEQ ID NO: 737 Amino acid sequence=SEQ ID NO: 1437; Antibody Heavy Chain No:181191 germ=IGHV1-2*02 seqid1=49.6 seqid3=50.0 thrd1=0.139 thrd3=0.123 divg=0.084 Nucleic acid sequence=SEQ ID NO: 738 Amino acid sequence=SEQ ID NO: 1438; Antibody Heavy Chain No:29619 germ=IGHV1-2*02 seqid1=50.4 seqid3=48.5 thrd1=0.144 thrd3=0.114 divg=0.084 Nucleic acid sequence=SEQ ID NO: 739 Amino acid sequence=SEQ ID NO: 1439; Antibody Heavy Chain No:138957 germ=IGHV1-2*02 seqid1=52.1 seqid3=53.8 thrd1=0.173 thrd3=0.143 divg=0.084 Nucleic acid sequence=SEQ ID NO: 740 Amino acid sequence=SEQ ID NO: 1440; Antibody Heavy Chain No:27733 germ=IGHV1-2*02 seqid1=52.9 seqid3=52.3 thrd1=0.137 thrd3=0.219 divg=0.081 Nucleic acid sequence=SEQ ID NO: 741 Amino acid sequence=SEQ ID NO: 1441; Antibody Heavy Chain No:54867 germ=IGHV1-2*02 seqid1=54.5 seqid3=50.8 thrd1=0.169 thrd3=0.212 divg=0.081 Nucleic acid sequence=SEQ ID NO: 742 Amino acid sequence=SEQ ID NO: 1442; Antibody Heavy Chain No:15769 germ=IGHV1-2*02 seqid1=54.5 seqid3=52.3 thrd1=0.169 thrd3=0.126 divg=0.081 Nucleic acid sequence=SEQ ID NO: 743 Amino acid sequence=SEQ ID NO: 1443; Antibody Heavy Chain No:23105 germ=IGHV1-2*02 seqid1=53.7 seqid3=51.5 thrd1=0.171 thrd3=0.123 divg=0.081 Nucleic acid sequence=SEQ ID NO: 744 Amino acid sequence=SEQ ID NO: 1444; Antibody Heavy Chain No:61167 germ=IGHV1-2*02 seqid1=53.7 seqid3=50.8 thrd1=0.170 thrd3=0.163 divg=0.081 Nucleic acid sequence=SEQ ID NO: 745 Amino acid sequence=SEQ ID NO: 1445; Antibody Heavy Chain No:57037 germ=IGHV1-2*02 seqid1=54.5 seqid3=50.8 thrd1=0.169 thrd3=0.212 divg=0.081 Nucleic acid sequence=SEQ ID NO: 746 Amino acid sequence=SEQ ID NO: 1446; Antibody Heavy Chain No:20299 germ=IGHV1-2*02 seqid1=53.7 seqid3=52.3 thrd1=0.217 thrd3=0.149 divg=0.081 Nucleic acid sequence=SEQ ID NO: 747 Amino acid sequence=SEQ ID NO: 1447; Antibody Heavy Chain No:19870 germ=IGHV1-2*02 seqid1=53.7 seqid3=52.3 thrd1=0.151 thrd3=0.210 divg=0.081 Nucleic acid sequence=SEQ ID NO: 748 Amino acid sequence=SEQ ID NO: 1448; Antibody Heavy Chain No:61564 germ=IGHV1-2*02 seqid1=50.4 seqid3=48.5 thrd1=0.238 thrd3=0.134 divg=0.081 Nucleic acid sequence=SEQ ID NO: 749 Amino acid sequence=SEQ ID NO: 1449; Antibody Heavy Chain No:58649 germ=IGHV1-2*02 seqid1=54.5 seqid3=50.8 thrd1=0.169 thrd3=0.212 divg=0.081 Nucleic acid sequence=SEQ ID NO: 750 Amino acid sequence=SEQ ID NO: 1450; Antibody Heavy Chain No:106478 germ=IGHV1-2*02 seqid1=49.6 seqid3=48.5 thrd1=0.152 thrd3=0.163 divg=0.081 Nucleic acid sequence=SEQ ID NO: 751 Amino acid sequence=SEQ ID NO: 1451; Antibody Heavy Chain No:50598 germ=IGHV1-2*02 seqid1=48.8 seqid3=48.5 thrd1=0.202 thrd3=0.106 divg=0.081 Nucleic acid sequence=SEQ ID NO: 752 Amino acid sequence=SEQ ID NO: 1452; Antibody Heavy Chain No:121214 germ=IGHV1-2*02 seqid1=51.2 seqid3=50.8 thrd1=0.203 thrd3=0.199 divg=0.081 Nucleic acid sequence=SEQ ID NO: 753 Amino acid sequence=SEQ ID NO: 1453; Antibody Heavy Chain No:61758 germ=IGHV1-2*02 seqid1=52.9 seqid3=51.5 thrd1=0.116 thrd3=0.124 divg=0.081 Nucleic acid sequence=SEQ ID NO: 754 Amino acid sequence=SEQ ID NO: 1454; Antibody Heavy Chain No:128584 germ=IGHV1-2*02 seqid1=46.3 seqid3=45.4 thrd1=0.153 thrd3=0.159 divg=0.081 Nucleic acid sequence=SEQ ID NO: 755 Amino acid sequence=SEQ ID NO: 1455; Antibody Heavy Chain No:16992 germ=IGHV1-2*02 seqid1=52.1 seqid3=48.5 thrd1=0.138 thrd3=0.150 divg=0.081 Nucleic acid sequence=SEQ ID NO: 756 Amino acid sequence=SEQ ID NO: 1456; Antibody Heavy Chain No:42053 germ=IGHV1-2*02 seqid1=52.1 seqid3=48.5 thrd1=0.185 thrd3=0.170 divg=0.081 Nucleic acid sequence=SEQ ID NO: 757 Amino acid sequence=SEQ ID NO: 1457; Antibody Heavy Chain No:41974 germ=IGHV1-2*02 seqid1=45.5 seqid3=46.2 thrd1=0.169 thrd3=0.220 divg=0.081 Nucleic acid sequence=SEQ ID NO: 758 Amino acid sequence=SEQ ID NO: 1458; Antibody Heavy Chain No:8314 germ=IGHV1-2*02 seqid1=49.6 seqid3=47.7 thrd1=0.135 thrd3=0.114 divg=0.081 Nucleic acid sequence=SEQ ID NO: 759 Amino acid sequence=SEQ ID NO: 1459.

### Example 5

### Creation of VRC01 and VRC01 like Multimeric Antibodies

[0558] As disclosed herein VRC01, a broadly neutralizing human IgG1 monoclonal antibody against HIV, was cloned from human B cells obtained from an HIV infected donor. VRC01 IgG1 was shown to have very potent neutralization activity against more than 90% of HIV isolates from all clades. This makes it an attractive therapeutic candidate, and a subject for extensive studies aiming to understand the nature of the antigenic stimuli needed to generate VRC01-like antibodies by infection or immunization. This example describes the characterization and development of an IgM antibody carrying the VRC01 V region. We also compare its neutralizing activity against HIV with that of the originally isolated VRC01 IgG1 (see FIG. 92).

[0559] The VRC01 V region was cloned into an expression vector containing the constant region from the m chain. The IgM was then produced in 293F cells transiently transfected with this plasmid along with two other plasmids that encoded the VRC01 k light chain and the human J chain, respectively. The IgM was purified by FPLC using a HiTrap IgM column and a Superose-6 size exclusion column.

[0560] Secreted pentameric IgM antibodies carrying the VRC01 V region were purified to homogeneity by IgM affinity chromatography followed by size exclusion chromatography. On a molar basis comparison with the VRC01-IgG, the IgM antibody has increased in vitro neutralizing activity against a panel of VRC01-sensitive and resistant HIV virus strains.

[0561] In view of the many possible embodiments to which the principles of our invention may be applied, it should be recognized that illustrated embodiments are only examples of the invention and should not be considered a limitation on the scope of the invention. Rather, the scope of the invention is defined by the following claims. We therefore claim as our invention all that comes within the scope and spirit of these claims.

### Example 6

[0562] Maturation of VRC01-like Antibodies

[0563] This example issustrates the nucleic acid and protein sequences of germline versions of VRC01-like antibodies. These germline versions of VRC01-like antibodies are useful, for example, in the development of a vaccine or a vaccine evaluation system for HIV-1. VRC01-like antibodies (e.g., VRC01) originated from a germline sequence that “evolved” in vivo through affinity maturation through repeated exposure of the immune system to HIV-1 gp120. Vaccines composed of antigens that are recognized by immunoglobulin sequences (germline sequences) present in HIV-1 naïve persons represent a rational starting point for HIV vaccine designes. Multiple germline sequences isolated from the VRC01 donor (Donor 45) are described below:

### VRC01 Germline (naïve-like) Rearrangements

[0564] Amino acid sequences and encoding DNA:

1. IGHV1-02*02_IGHD3-16*-2_{L14}_IGHJ1*01
(SEQ ID NO: 1460)
caggtgcagctggtgcagtctggggctgaggtgaagaagcctggggcctcagtgaaggtctcctgcaaggcttctggatacaccttcaccggctactatatg
cactgggtgcgacaggcccctggacaagggcttgagtggatgggatggatcaaccctaacagtggtggcacaaactatgcacagaagtttcagggcagggtc
accatgaccagggacacgtccatcagcacagcctacatggagctgagcaggctgagatctgacgacacggccgtgtattactgtactaggggaaaaaactgt
gattacgtttgggacttccagcactggggccagggcaccctggtcaccgtctcctcag
(SEQ ID NO: 1461)
QVQLVQSGAEVKKPGASVKVSCKASGYTFTGYYMHWVRQAPGQGLEWMGWINPNSGGTNYAQKF
QGRVTMTRDTSISTAYMELSRLRSDDTAVYYCTRGKNCDYVWDFQHWGQGTLVTVSS
2. IGHV1-02*02_IGHD3-16*02_{L14}_IGHJ4*02
(SEQ ID NO: 1462)
caggtgcagctggtgcagtctggggctgaggtgaagaagcctggggcctcagtgaaggtctcctgcaaggcttctggatacaccttcaccggctactatatg
cactgggtgcgacaggcccctggacaagggcttgagtggatgggatggatcaaccctaacagtggtggcacaaactatgcacagaagtttcagggcagggtc
accatgaccagggacacgtccatcagcacagcctacatggagctgagcaggctgagatctgacgacacggccgtgtattactgtactaggggaaaaaactgt
gattacgtttgggactttgactactggggccagggaaccctggtcaccgtctcctcag
(SEQ ID NO: 1463)
QVQLVQSGAEVKKPGASVKVSCKASGYTFTGYYMHWVRQAPGQGLEWMGWINPNSGGTNYAQKF
QGRVTMTRDTSISTAYMELSRLRSDDTAVYYCTRGKNCDYVWDFDYWGQGTLVTVSS
3. IGHV1-02*02_IGHD3-16*02_{L16}_IGHJ1*01
(SEQ ID NO: 1464)
caggtgcagctggtgcagtctggggctgaggtgaagaagcctggggcctcagtgaaggtctcctgcaaggcttctggatacaccttcaccggctactatatg
cactgggtgcgacaggcccctggacaagggcttgagtggatgggatggatcaaccctaacagtggtggcacaaactatgcacagaagtttcagggcagggtc
accatgaccagggacacgtccatcagcacagcctacatggagctgagcaggctgagatctgacgacacggccgtgtattactgtactaggggaaaaaactAt
gattacgtttgggacttccagcactggggccagggcaccctggtcaccgtctcctcag
(SEQ ID NO: 1465)
QVQLVQSGAEVKKPGASVKVSCKASGYTFTGYYMHWVRQAPGQGLEWMGWINPNSGGTNYAQKF
QGRFTMTRDTSISTAYMELSRLRSDDTAVYYCTRGKNYDYVWDFQHWGQGTLVTVSS
4. IGHV1-02*02_IGHD3-16*02_{L18}_IGHJ1*01
(SEQ ID NO: 1466)
caggtgcagctggtgcagtctggggctgaggtgaagaagcctggggcctcagtgaaggtctcctgcaaggcttctggatacaccttcaccggctactatatg
cactgggtgcgacaggcccctggacaagggcttgagtggatgggatggatcaaccctaacagtggtggcacaaactatgcacagaagtttcagggcagggtc
accatgaccagggacacgtccatcagcacagcctacatggagctgagcaggctgagatctgacgacacggccgtgtattactgtactaggggaaaaaattAt
gattacgtttgggacttccagcactggggccagggcaccctggtcaccgtctcctcag
(SEQ ID NO: 1467)
QVQLVQSGAEVKKPGASVKVSCKASGYTFTGYYMHWVRQAPGQGLEWMGWINPNSGGTNYAQKF
QGRVTMTRDTSISTAYMELSRLRSDDTAVYYCTRGKNYDYVWDFQHWGQGTLVTVSS
5. IGKV3-11*01_{3′del}_IGKJ2*01
(SEQ ID NO: 1468
gaaattgtgttgacacagtctccagccaccctgtctttgtctccaggggaaagagccaccctctcctgcagggccagtcagagtgttagcttagcctggtac
caacagaaacctggccaggctcccaggctcctcatctatgatgcatccaacagggccactggcatcccagccaggttcagtggcagtgggtctgggacagac
ttcactctcaccatcagcagcctagagcctgaagattttgcagtttattactgtcagcagtatgaattttttggccaggggaccaagctggagatcaaac
(SEQ ID NO: 1469)
EIVLTQSPATSLSPGERATLSCRASQSVSLAWYQQKPGQAPRLLIYDASNRATGIPARFSGSG
SGTDFTLTISSLEPEDFAVYYCQQYEFFGQGTKLEIK
6. IGKV3-11*01_{del6}_IGKJ2*01
(SEQ ID NO: 1470)
cattcagaaattgtgttgacacagtctccagccaccctgtctttgtctccaggggaaagagccaccctctcctgcagggccagtcagagtggctaCttagcc
tggtaccaacagaaacctggccaggctcccaggctcctcatctatgatgcatccaacagggccactggcatcccagccaggttcagtggcagtgggtctggg
acagacttcactctcaccatcagcagcctagagcctgaagattttgcagtttattactgtcagcagtatgaattttttggccaggggaccaagctggagatc
aaac
(SEQ ID NO: 1471)
HSEIVLTQSPATLSLSPGERATLSCRASQSGYLAWYQQKPGQAPRLLIYDASNRATGIPARFSGSG
SGTDFTLTISSLEPEDFAVYYCQQYEFFGQGTKLEIK
7. IGKV3-11*01_IGKJ2*01
(SEQ ID NO: 1472)
cattcagaaattgtgttgacacagtctccagccaccctgtctttgtctccaggggaaagagccaccctctcctgcagggccagtcagagtgttagcagctaC
ttagcctggtaccaacagaaacctggccaggctcccaggctcctcatctatgatgcatccaacagggccactggcatcccagccaggttcagtggcagtggg
tctgggacagacttcactctcaccatcagcagcctagagcctgaagattttgcagtttattactgtcagcagtatgaattttttggccaggggaccaagctg
gagatcaaac
(SEQ ID NO: 1473)
EIVLTQSPATLSLSPGERATLSCRASQSVSSYLAWYQQKPGQAPRLLIYDASNRATGIPARFSGSG
SGTDFTLTISSLEPEDFAVYYCQQYEFFGQGTKLEIK
8. IGKV3-11*01_IGKJ2*01_{Long Ins}
(SEQ ID NO: 1474)
cattcagaaattgtgttgacacagtctccagccaccctgtctttgtctccaggggaaagagccaccctctcctgcagggccagtcagagtgttagcagctac
ttagcctggtaccaacagaaacctggccaggctcccaggctcctcatctatgatgcatccaacagggccactggcatcccagccaggttcagtggcagtggg
tctgggacagacttcactctcaccatcagcagcctagagcctgaagattttgcagtttattactgtcagcagtatgaattttttggccaggggaccaaggtc
caggtcgaca
(SEQ ID NO: 1475)
EIVLTQSPATLSLSPGERATLSCRASQSVSSYLAWYQQKPGQAPRLLIYDASNRATGIPARFSGSG
SGTDFTLTISSLEPEDFAVYYCQQYEFFGQGTKVQVD
9. IGKV3-NL1_{3′del6}_IGKJ2*01
(SEQ ID NO: 1476)
gaaattgtgttgacacagtctccagccaccctgtctttgtctccaggggaaagagccaccctctcctgcagggccagtcagagtgttagcttagcctggtac
caacagaaacctggccaggctcccaggctcctcatctatggtgcatccaccagggccactggcatcccagccaggttcagtggcagtgggtctgggacagag
ttcactctcaccatcagcagcctgcagtctgaagattttgcagtttattactgtcagcagtatgaattttttggccaggggaccaagctggagatcaaac
(SEQ ID NO: 1477)
EIVLTQSPATLSLSPGERATLSCRASQSVSLAWYQQKPGQAPRLLIYGASTRATGIPARFSGSG
SGTEFTLTISSLQSEDFAVYYCQQYEFFGQGTKLEIK
10. IGKV3-NL1_{del6}_IGKJ2*01
(SEQ ID NO: 1478)
cattcagaaattgtgttgacacagtctccagccaccctgtctttgtctccaggggaaagagccaccctctcctgcagggccagtcagagtggctacttagcc
tggtaccaacagaaacctggccaggctcccaggctcctcatctatggtgcatccaccagggccactggcatcccagccaggttcagtggcagtgggtctggg
acagagttcactctcaccatcagcagcctgcagtctgaagattttgcagtttattactgtcagcagtatgaattttttggccaggggaccaagctggagatc
aaac
(SEQ ID NO: 1479)
HSEIVLTQSPATLSLSPGERATLSCRASQSGYLAWYQQKPGQAPRLLIYGASTRATGIPARFSGSG
SGTEFTLTISSLQSEDFAVYYCQQYEFFGQGTKLEIK
11. IGKV3-NL1*01_IGKJ2*01
(SEQ ID NO: 1480)
cattcagaaattgtgttgacacagtctccagccaccctgtctttgtctccaggggaaagagccaccctctcctgcagggccagtcagagtgttagcagctac
ttagcctggtaccaacagaaacctggccaggctcccaggctcctcatctatggtgcatccaccagggccactggcatcccagccaggttcagtggcagtggg
tctgggacagagttcactctcaccatcagcagcctgcagtctgaagattttgcagtttattactgtcagcagtatgaattttttggccaggggaccaagctg
gagatcaaac
(SEQ ID NO: 1481)
EIVLTQSPATLSLSPGERATLSCRASQSVSSYLAWYQQKPGQAPRLLIYGASTRATGIP ARFSGSG
SGTEFTLTISSLQSEDFAVYYCQQYEFFGQGTKLEIK
12. IGKV3-NL1*01_IGKJ2*01_{LongIns}
(SEQ ID NO: 1482)
cattcagaaattgtgttgacacagtctccagccaccctgtctttgtctccaggggaaagagccaccctctcctgcagggccagtcagagtgttagcagctac
ttagcctggtaccaacagaaacctggccaggctcccaggctcctcatctatggtgcatccaccagggccactggcatcccagccaggttcagtggcagtggg
tctgggacagagttcactctcaccatcagcagcctgcagtctgaagattttgcagtttattactgtcagcagtatgaattttttggccaggggaccaaggtc
caggtcgaca
(SEQ ID NO: 1483)
EIVLTQSPATLSLSPGERATLSCRASQSVSSYLAWYQQKPGQAPRLLIYGASTRATGIP ARFSGSG
SGTEFTLTISSLQSEDFAVYYCQQYEFFGQGTKVQVD

[0565] VRC03 Germline (naïve-like) Rearrangements

1. IGHV1-02*02ᵢₙₛ_IGHD3-22*02_{L9}_IGHJ1*01
(SEQ ID NO: 1484)
caggtgcagtggtgcagtctggggctgaggtgaagaagcctggggcctcagtgaaggtctcctgcaaggcttctggatacaccttcaccggctactatatgc
actgggtgcgacaggcccctggacaagggcttgagtggatgggatggatcaaccctaacagtggtggcacaaactatgcacagaagtttcagggcagggtca
ccatgactcgacaattatctcaagaccccagggacacgtccatcagcacagcctacatggagctgagcaggctgagatctgacgacacggccgtgtattact
gtgtccggagagggtcctgtggttattgcggagactttccctggcaatactggggccagggcaccctggtcaccgtacctcag
(SEQ ID NO: 1485)
QVQLVQSGAEVKKPGASVKVSCKASGYTFTGYYMHWVTGPWTRAVDGMDQPQWWHKLCTEVSG
QGHHDSQLSQDPRDTSISTAYMELSRLRSDDTAVYYCVRRGSCGYCGDFPWQYWGQGTLVTVSS
2. IGHV1-02*02ᵢₙₛ_IGHD3-16_{L8}_IGHJ1*01
(SEQ ID NO: 1486)
caggtgcagctggtgcagtctggggctgaggtgaagaagcctggggcctcagtgaaggtctcctgcaaggcttctggatacaccttcaccggctactatatg
cactgggtgcgacaggcccctggacaagggcttgagtggatgggatggatcaaccctaacagtggtggcacaaactatgcacagaagtttcagggcagggtc
accatgactcgacaattatctcaagaccccagggacacgtccatcagcacagcctacatggagctgagcaggctgagatctgacgacacggccgtgtattac
tgtgtccggagagggtcctatgattattgcggagactttccctggcaatactggggccagggcaccctggtcaccgtctcctcag
(SEQ ID NO: 1487)
QVQLVQSGAEVKKPGASVKVSCKASGYTFTGYYMHWVTGPWTRAVDGMDQPQWWHKLCTEVSG
QGHHDSQLSQDPRDTSISTAYMELSRLRSDDTAVYYCVRRGSYDYCGDFPWQYWGQGTLVTVSS
3. IGHV1-02*01_IGHD3-16_{L8}_IGHJ1*01
(SEQ ID NO: 1488)
caggtgcagctggtgcagtaggggctgaggtgaagaagcctggggcctcagtgaaggtctcctgcaaggcttctggatacaccttcaccggctactatatgc
actgggtgcgacaggcccctggacaagggcttgagtggatgggatggatcaaccctaacagtggtggcacaaactatgcacagaagtttcagggcagggtca
ccagtaccagggacacgtccatcagcacagcctacatggagctgagcaggctgagatctgacgacacggccgtgtattactgtgtccggagagggtcctatg
attattgcggagactttccctggcaatactggggccagggcaccctggtcaccgtctcctcag
(SEQ ID NO: 1489)
QVQLVQSGAEVKKPGASVKVSCKASGYTFTGYYMHWVRQAPGQGLEWMGWINPNSGGTNYAQKF
QGRVTSTRDTSISTAYMELSRLRSDDTAVYYCVRRGSYDYCGDFPWQYWGQGTLVTVSS
4. IGKV3-20*01_{3′del}_IGKJ2*01
(SEQ ID NO: 1490)
gaaattgtgagacgcagtctccaggcaccctgtctttgtctccaggggaaagagccaccctctcctgcagggccagtcagagtgttagcagcttagcctggt
accagcagaaacctggccaggctcccaggctcctcatctatggtgcatccagcagggccactggcatcccagacaggttcagtggcagtgggtctgggacag
acttcactctcaccatcagcagactggagcctgaagattttgcagtgtattactgtcaacaatttgaattttttggccaggggaccaagctggagatcaaac
(SEQ ID NO: 1491)
EIVLTQSPGTLSLSPGERATLSCRASQSVSSLAWYQQKPGQAPRLLIYGASSRATGIPDRFSGSG
SGTDFTLTISRLEPEDFAVYYCQQFEFFGQGTKLEIK
5. IGKV3-20*01_{dEl}_IGKJ2*01
(SEQ ID NO: 1492)
gaaattgtgttgacgcagtctccaggcaccctgtctttgtctccaggggaaagagccaccctctcctgcagggccagtcagagtggcagctacttagcctgg
taccagcagaaacctggccaggctcccaggctcctcatctatggtgcatccagcagggccactggcatcccagacaggttcagtggcagtgggtctgggaca
gacttcactctcaccatcagcagactggagcctgaagattttgcagtgtattactgtcaacaatttgaattttttggccaggggaccaagctggagatcaaa
c
(SEQ ID NO: 1493)
EIVLTQSPGTLSLSPGERATLSCRASQSGSYLAWYQQKPGQAPRLLIYGASSRATGIPDRFSGSG
SGTDFTLTISRLEPEDFAVYYCQQFEFFGQGTKLEIK
6. IGKV3-20*01_IGKJ2*01
(SEQ ID NO: 1494)
gaaattgtgttgacgcagtctccaggcaccctgtctttgtctccaggggaaagagccaccctctcctgcagggccagtcagagtgttagcagcagctactta
gcctggtaccagcagaaacctggccaggctcccaggctcctcatctatggtgcatccagcagggccactggcatcccagacaggttcagtggcagtgggtct
gggacagacttcactctcaccatcagcagactggagcctgaagattttgcagtgtattactgtcaacaatttgaattttttggccaggggaccaagctggag
atcaaac
(SEQ ID NO: 1495)
EIVLTQSPGTLSLSPGERATLSCRASQSVSSSYLAWYQQKPGQAPRLLIYGASSRATGIPDRFSGSGSG
TDFTLTISRLEPEDFAVYYCQQFEFFGQGTKLEIK
7. IGKV3-NL5*01_IGKJ2*01
(SEQ ID NO: 1496)
gaaattgtgttgacgcagtctccagccaccctgtctttgtctccaggggaaagagccaccctctcctgcagggccagtcagagtgttagcagcagctactta
gcctggtaccagcagaaacctggccaggctcccaggctcctcatctatgatgcatccagcagggccactggcatcccagacaggttcagtggcagtgggtct
gggacagacttcactctcaccatcagcagactggagcctgaagattttgcagtctattactgtcaacaatttgaattttttggccaggggaccaagctggag
atcaaac
(SEQ ID NO: 1497)
EIVLTQSPATLSLSPGERATLSCRASQSVSSSYLAWYQQKPGQAPRLLIYDASSRATGIPDRFSGSG
SGTDFTLTISRLEPEDFAVYYCQQFEFFGQGTKLEIK
8. IGKV3-NL5*01_{del}_IGKJ2*01
(SEQ ID NO: 1498)
gaaattgtgttgacgcagtaccagccaccctgtctttgtctccaggggaaagagccaccctctcctgcagggccagtcagagtggcagctacttagcctggt
accagcagaaacctggccaggctcccaggctcctcatctatgatgcatccagcagggccactggcatcccagacaggttcagtggcagtgggtctgggacag
acttcactctcaccatcagcagactggagcctgaagattttgcagtctattactgtcaacaatttgaattttttggccaggggaccaagctggagatcaaac
(SEQ ID NO: 1499)
EIVLTQSPATLSLSPGERATLSCRASQSGSYLAWYQQKPGQAPRLLIYDASSRATGIPDRFSGSG
SGTDFTLTISRLEPEDFAVYYCQQFEFFGQGTKLEIK
1. VRC 9719 VRC01 germline/IgM:
(SEQ ID NO: 1500)
MGWSCIILFLVATATGVHSQVQLVQSGAEVKKPGASVKVSCKASGYTFTGYYMHWVRQAPGQGLE
WMGWINPNSGGTNYAQKFQGRVTMTRDTSISTAYMELSRLRSDDTAVYYCAREKNCDYNWDFEH
WGRGTPVIVSSGSASAPTLFPLVSCENSPSDTSSVAVGCLAQDFLPDSITFSWKYKNNSDISSTRGFPSV
LRGGKYAATSQVLLPSKDVMQGTDEHVVCKVQHPNGNKEKNVPLPVIAELPPKVSVFVPPRDGFFG
NPRKSKLICQATGFSPRQIQVSWLREGKQVGSGVTTDQVQAEAKESGPTTYKVTSTLTIKESDWLSQS
MFTCRVDHRGLTFQQNASSMCVPDQDTAIRVFAIPPSFASIFLTKSTKLTCLVTDLTTYDSVTISWTRQ
NGEAVKTHTNISESHPNATFSAVGEASICEDDWNSGERFTCTVTHTDLPSPLKQTISRPKGVALHRPD
VYLLPPAREQLNLRESATITCLVTGFSPADVFVQWMQRGQPLSPEKYVTSAPMPEPQAPGRYFAHSIL
TVSEEEWNTGETYTCVVAHEALPNRVTERTVDKSTGKPTLYNVSLVMSDTAGTCY
(SEQ ID NO: 1501)
atgggatggtcatgtatcatcctttttctagtagcaactgcaaccggtgtacattcccaggtgcagctggtgcagtctggggctgaggtgaagaagcctggg
gcctcagtgaaggtctcctgcaaggcttctggatacaccttcaccggctactatatgcactgggtgcgacaggccctctggacaagggcttgagtggatggg
atggatcaaccctaacagtggtggcacaaactatgcacagaagtttcagggcagggtcaccatgaccagggacacgtccatcagcacagcctacatggagct
gagcaggctgagatctgacgacacggccgtgtattactgtgcgagagaaaaaaactgtgattacaattgggacttcgaacactggggccggggcaccccggt
catcgtctcatcagggagtgcatccgccccaacccttttccccctcgtctcctgtgagaattccccgtcggatacgagcagcgtggccgttggctgcctcgc
acaggacttccttcccgactccatcactttctcctggaaatacaagaacaactctgacatcagcagcacccggggcttcccatcagtcctgagagggggcaa
gtacgcagccacctcacaggtgctgctgccttccaaggacgtcatgcagggcacagacgaacacgtggtgtgcaaagtccagcaccccaacggcaacaaaga
aaagaacgtgcctcttccagtgattgccgagctgcctcccaaagtgagcgtcttcgtcccaccccgcgacggcttcttcggcaacccccgcaagtccaagct
catctgccaggccacgggtttcagtccccggcagattcaggtgtcctggctgcgcgaggggaagcaggtggggtctggcgtcaccacggaccaggtgcagga
gaggccaaagagtctgggcccacgacctacaaggtgaccagcacactgaccatcaaagagagcgactggctcagccagagcatgttcacctgccgcgtggat
cacaggggcctgaccttccagcagaatgcgtcctccatgtgtgtccccgatcaagacacagccatccgggtcttcgccatccccccatcctttgccagcatc
ttcctcaccaagtccaccaagttgacctgcctggtcacagacctgaccacctatgacagcgtgaccatctcctggacccgccagaatggcgaagctgtgaaa
acccacaccaacatctccgagagccaccccaatgccactttcagcgccgtgggtgaggccagcatctgcgaggatgactggaattccggggagaggttcacg
tgcaccgtgacccacacagacctgccctcgccactgaagcagaccatctcccggcccaagggggtggccctgcacaggcccgatgtctacttgctgccacca
gcccgggagcagctgaacctgcgggagtcggccaccatcacgtgcctggtgacgggcttctctcccgcggacgtcttcgtgcagtggatgcagagggggcag
cccttgtccccggagaagtatgtgaccagcgccccaatgcctgagccccaggccccaggccggtacttcgcccacagcatcctgaccgtgtccgaagaggaa
tggaacacgggggagacctacacctgcgtggtggcccatgaggccctgcccaacagggtcaccgagaggaccgtggacaagtccaccggtaaacccaccctg
tacaacgtgtccctggtcatgtccgacacagctggcacctgctactga
2. VRC 9719 Human J chain:
(SEQ ID NO: 1502)
MKNHLLFWGVLAVFIKAVHVKAQEDERIVLVDNKCKCARITSRIIRSSEDPNEDIVERNIRIIVPLNNR
ENISDPTSPLRTRFVYHLSDLCKKCDPTEVELDNQIVTATQSNICDEDSATETCYTYDRNKCYTAVVP
LVYGGETKMVETALTPDACYPD
(SEQ ID NO: 1503)
atgaagaaccatttgcttttctggggagtcctggcggtttttattaaggctgttcatgtgaaagcccaagaagatgaaaggattgttcttgttgacaacaaa
tgtaagtgtgcccggattacttccaggatcatccgttcttccgaagatcctaatgaggacattgtggagagaaacatccgaattattgttcctctgaacaac
agggagaatatctctgatcccacctcaccattgagaaccagatttgtgtaccatttgtctgacctctgtaaaaaatgtgatcctacagaagtggagctggat
aatcagatagttactgctacccagagcaatatctgtgatgaagacagtgctacagagacctgctacacttatgacagaaacaagtgctacacagctgtggtc
ccactcgtatatggtggtgagaccaaaatggtggaaacagccttaaccccagatgcctgctatcctgactaa
3. VRC01-H(S239D/I332E):
(SEQ ID NO: 1504)
MGWSCIILFLVATATGVHSQVQLVQSGGQMKKPGESMRISCRASGYEFIDCTLNWIRLAPGKRPEWM
GWLKPRGGAVNYARPLQGRVTMTRDVYSDTAFLELRSLTVDDTAVYFCTRGKNCDYNWDFEHWG
RGTPVIVSSPSTKGPSVFPLAPSSKSTSGGTAALGCLVKDYFPEPVTVSWNSGALTSGVHTFPAVLQSS
GLYSLSSVVTVPSSSLGTQTYICNVNHKPSNTKVDKKVEPKSCDKTHTCPPCPAPELLGGPDVFLFPPK
PKDTLMISRTPEVTCVVVDVSHEDPEVKFNWYVDGVEVHNAKTKPREEQYNSTYRVVSVLTVLHQD
WLNGKEYKCKVSNKALPAPEEKTISKAKGQPREPQVYTLPPSRDELTKNQVSLTCLVKGFYPSDIAV
EWESNGQPENNYKTTPPVLDSDGSFFLYSKLTVDKSRWQQGNVFSCSVMHEALHNHYTQKSLSLSP
GK
(SEQ ID NO: 1505)
atgggatggtcatgtatcatcctttttctagtagcaactgcaaccggtgtacattcccaggtgcagctggtgcagtctggaggtcagatgaagaagcctggc
gagtcgatgagaatttcttgtcgggcttctggatatgaatttattgattgtacgctaaattggattcgtctggcccccggaaaaaggcctgagtggatggga
tggctgaagcctcgggggggggccgtcaactacgcacgtccacttcagggcagagtgaccatgactcgagacgtttattccgacacagcctttttggagctg
cgctcgttgacagtagacgacacggccgtctacttttgtactaggggaaaaaactgtgattacaattgggacttcgaacactggggccggggcaccccggtc
atcgtctcatcaccgtcgaccaagggcccatcggtcttccccctggcaccctcctccaagagcacctctgggggcacagcggccctgggctgcctggtcaag
gactacttccccgaaccggtgacggtgtcgtggaactcaggcgccctgaccagcggcgtgcacaccttcccggctgtcctacagtcctcaggactctactcc
ctcagcagcgtggtgaccgtgccctccagcagcttgggcacccagacctacatctgcaacgtgaatcacaagcccagcaacaccaaggtggacaagaaagtt
gagcccaaatcttgtgacaaaactcacacatgcccaccgtgcccagcacctgaactcctggggggaccggatgtcttcctcttccccccaaaacccaaggac
accctcatgatctcccggacccctgaggtcacatgcgtggtggtggacgtgagccacgaagaccctgaggtcaagttcaactggtacgtggacggcgtggag
gtgcataatgccaagacaaagccgcgggaggagcagtacaacagcacgtaccgtgtggtcagcgtcctcaccgtcctgcaccaggactggctgaatggcaag
gagtacaagtgcaaggtctccaacaaagccctcccagcccccgaggagaaaaccatctccaaagccaaagggcagccccgagaaccacaggtgtacaccctg
cccccatcccgggatgagctgaccaagaaccaggtcagcctgacctgcctggtcaaaggcttctatcccagcgacatcgccgtggagtgggagagcaatggg
cagccggagaacaactacaagaccacgcctcccgtgctggactccgacggctccttcttcctctacagcaagctcaccgtggacaagagcaggtggcagcag
gggaacgtcttctcatgctccgtgatgcatgaggctctgcacaaccactacacgcagaagagcctctccctgtctccgggtaaatga

We claim:

1. An isolated human monoclonal antibody, wherein a heavy chain of the antibody comprises amino acids 26-35 (CDR1), 50-66 (CDR2), and 106-119 (CDR3) of SEQ ID NO: 27, and wherein the antibody comprises a light chain, and wherein the antibody specifically binds gp120 of HIV-1, and wherein the antibody is neutralizing.

2. The isolated human monoclonal antibody of claim 2, wherein the light chain of the antibody comprises amino acids 24-33 (CDR1), 49-55 (CDR2), and 88-92 (CDR3) of SEQ ID NO: 28.

3. The isolated human monoclonal antibody of claim 1, wherein the heavy chain of the antibody comprises SEQ ID NO: 27.

4. The isolated human monoclonal antibody of claim 2, wherein the light chain of the antibody comprises SEQ ID NO: 28.

5. The isolated human monoclonal antibody of claim 1, wherein the antibody is an IgG, IgM or IgA.

6. An isolated functional fragment of the isolated human monoclonal antibody of claim 1, wherein the functional fragment specifically binds gp120 of HIV-1 and is neutralizing.

7. The isolated functional fragment of claim 6, wherein the fragment is a Fab fragment, a Fab′ fragment, a F(ab)′₂ fragment, a single chain Fv protein (scFv), or a disulfide stabilized Fv protein (dsFv).

8. The isolated functional fragment of claim 7, wherein the fragment is a Fab fragment.

9. The isolated human monoclonal antibody of claim 1, or a functional fragment thereof, wherein the antibody is labeled.

10. The isolated human monoclonal antibody or functional fragment of claim 9, wherein the label is a fluorescent, enzymatic, or radioactive label.

11. A composition comprising the antibody of claim 1, or a functional fragment thereof that specifically binds gp120, and a pharmaceutically acceptable carrier.

12. An isolated nucleic acid molecule encoding the human monoclonal antibody of claim 1, or a functional fragment thereof.

13. The isolated nucleic acid molecule of claim 12 comprising at least one of one of the nucleic acid sequences set forth as SEQ ID NOs: 33-34.

14. The isolated nucleic acid molecule of claim 12, operably linked to a promoter.

15. The isolated human monoclonal antibody of claim 1, wherein the heavy chain of the antibody comprises amino acids 26-35 (CDR1), 50-66 (CDR2), and 106-119 (CDR3) of SEQ ID NO: 27; and wherein the light chain of the antibody comprises amino acids 24-33 (CDR1), 49-55 (CDR2), and 88-92 (CDR3) of SEQ ID NO: 28.

16. An isolated host cell transformed with the nucleic acid molecule of claim 12.

17. The isolated nucleic acid molecule of claim 12, encoding a heavy chain and a light chain of an antibody, wherein
(a) the heavy chain of the antibody comprises amino acids 26-35 (CDR1), 50-66 (CDR2), and 106-119 (CDR3) of SEQ ID NO: 27 and the light chain of the antibody comprises amino acids 24-33 (CDR1), 49-55 (CDR2), and 88-92 (CDR3) of SEQ ID NO: 28;
(b) the heavy chain of the antibody comprises amino acids 26-35 (CDR1), 50-66 (CDR2), and 106-119 (CDR3) of SEQ ID NO: 27 and the light chain of the antibody comprises SEQ ID NO: 28;
(c) the heavy chain of the antibody comprises SEQ ID NO: 27 and the light chain of the antibody comprises amino acids 24-33 (CDR1), 49-55 (CDR2), and 88-92 (CDR3) of SEQ ID NO: 28; or
(d) the heavy chain of the antibody comprises SEQ ID NO: 27 and the light chain of the antibody comprises SEQ ID NO: 28,
wherein the encoded antibody specifically binds gp120 of HIV-1, and wherein the encoded antibody is neutralizing.

18. An expression vector encoding the nucleic acid molecule of claim 1.

19. The expression vector of claim 18, encoding an immunoadhesin.

20. The expression vector of claim 18, wherein the antibody is an IgA.

21. The expression vector of claim 18, wherein the expression vector comprises a promoter and an enhancer, and wherein the promoter is a cytomegalovirus promoter and/or the enhancer is a cytomegalovirus enhancer.

22. The expression vector of claim 18, comprising RNA splicing donor sites, RNA splicing acceptor sites and/or internal ribosomal binding sequences.

23. The expression vector of claim 18, wherein the heavy chain of the antibody and the light chain of the antibody are expressed as a fusion polypeptide following the introduction of the expression vector in a host cell.

24. The expression vector of claim 23, comprising a nucleic acid sequence encoding a furin cleavage site between the nucleic acid sequence encoding the heavy chain of the antibody and the nucleic acid sequence encoding the light chain of the antibody.

25. The expression vector of claim 18, wherein the vector is expressed in Lactobacillus.

26. The expression vector of claim 25, comprising a leader sequence that is expressed in Lactobacillus.

27. The expression vector of claim 15, encoding a selectable marker.

28. The expression vector of claim 22, wherein the RNA splicing donor sites are HTLV-1 or CMV RNA splicing donor sites.

29. The expression vector of claim 28, wherein the RNA splicing acceptor sites are HTLV-1 or CMV RNA splicing acceptor sites.

30. A method of detecting a human immunodeficiency virus (HIV)-1 infection in a subject comprising:
contacting a biological sample from the subject with at least one isolated human monoclonal antibody of claim 1, or a functional fragment thereof that specifically binds gp120 and is neutralizing; and
detecting antibody bound to the sample,
wherein the presence of antibody bound to the sample indicates that the subject has an HIV-1 infection.

31. The method of claim 30, wherein the isolated human monoclonal antibody is directly labeled.

32. The method of claim 30, further comprising:
contacting the sample with a second antibody that specifically binds the isolated human monoclonal antibody; and
detecting the binding of the second antibody,
wherein an increase in binding of the second antibody to the sample as compared to binding of the second antibody to a control sample detects the presence of an HIV-1 infection the subject.

33. A method for preventing or treating an human immunodeficiency virus (HIV)-1 infection in a subject, comprising administering to the subject a therapeutically effective amount of the antibody of claim 1, or a functional fragment thereof that specifically binds gp120 and is neutralizing, thereby preventing or treating the HIV-1 infection.

34. The method of claim 33, wherein the method is a method for treating an HIV-1 infection, and wherein the subject has acquired immune deficiency syndrome (AIDS).

35. The method of claim 33, further comprising administering to the subject an anti-viral agent.

36. The method of claim 33, further comprising measuring HIV-1 viral titer in the subject.

37. A method for testing a potential vaccine, comprising
contacting the potential vaccine with an antibody of claim 1, or a functional fragment thereof that specifically binds gp120 and is neutralizing; and
detecting the binding of the antibody to an immunogen in the potential vaccine,
thereby identifying the potential vaccine as being of clinical interest.

The application's sequence listing, which the Patent Office published only in electronic form, follows.

SEQUENCE LISTING (1505 sequences)

SEQ ID NO: 1 - protein, 122 aa, Homo sapiens
QVQLVQSGGQMKKPGESMRISCRASGYEFIDCTLNWIRLAPGKRPEWMGWLKPRGGAVNYARPLQGRVTMTRDVYSDTAFLELRSLTVDDTAVYFCTRGKNCDYNWDFEHWGRGTPVIVSSP

SEQ ID NO: 2 - protein, 104 aa, Homo sapiens
EIVLTQSPGTLSLSPGETAIISCRTSQYGSLAWYQQRPGQAPRLVIYSGSTRAAGIPDRFSGSRWGPDYNLTISNLESGDFGVYYCQQYEFFGQGTKVQVDIKR

SEQ ID NO: 3 - protein, 122 aa, Homo sapiens
QVQLVQSGGQMKKPGESMRISCQASGYEFIDCTLNWVRLAPGRRPEWMGWLKPRGGAVNYARPLQGRVTMTRDVYSDTAFLELRSLTADDTAVYYCTRGKNCDYNWDFEHWGRGTPVTVSSA

SEQ ID NO: 4 - protein, 104 aa, Homo sapiens
EIVLTQSPGTLSLSPGETAIISCRTSQYGSLAWYQQRPGQAPRLVIYSGSTRAAGIPDRFSGSRWGPDYNLTIRNLESGDFGLYYCQQYEFFGQGTKVQVDIKR

SEQ ID NO: 5 - protein, 462 aa, Homo sapiens
RITLKESGPPLVKPTQTLTLTCSFSGFSLSDFGVGVGWIRQPPGKALEWLAIIYSDDDKRYSPSLNTRLTITKDTSKNQVVLVMTRVSPVDTATYFCAHRRGPTTLFGVPIARGPVNAMDVWGQGITVTISSTSTKGPSVFPLAPSSKSTSGGTAALGCLVKDYFPEPVTVSWNSGALTSGVHTFPAVLQSSGLYSLSSVVTVPSSSLGTQTYICNVNHKPSNTKVDKKVEPKSCDKTHTCPPCPAPELLGGPSVFLFPPKPKDTLMISRTPEVTCVVVDVSHEDPEVKFNWYVDGVEVHNAKTKPREEQYNSTYRVVSVLTVLHQDWLNGKEYKCKVSNKALPAPIEKTISKAKGQPREPQVYTLPPSRDELTKNQVSLTCLVKGFYPSDIAVEWESNGQPENNYKTTPPVLDSDGSFFLYSKLTVDKSRWQQGNVFSCSVMHEALHNHYTQKSLSLSPGK

SEQ ID NO: 6 - protein, 462 aa, Homo sapiens
RITLKESGPPLVKPTQTLTLTCSFSGFSLSDFGVGVGWIRQPPGKALEWLAIIYSDDDKRYSPSLNTRLTITKDTSKNQVVLVMTRVSPVDTATYFCAHRRGPTTWFGVPIARGPVNAMDVWGQGITVTISSTSTKGPSVFPLAPSSKSTSGGTAALGCLVKDYFPEPVTVSWNSGALTSGVHTFPAVLQSSGLYSLSSVVTVPSSSLGTQTYICNVNHKPSNTKVDKKVEPKSCDKTHTCPPCPAPELLGGPSVFLFPPKPKDTLMISRTPEVTCVVVDVSHEDPEVKFNWYVDGVEVHNAKTKPREEQYNSTYRVVSVLTVLHQDWLNGKEYKCKVSNKALPAPIEKTISKAKGQPREPQVYTLPPSRDELTKNQVSLTCLVKGFYPSDIAVEWESNGQPENNYKTTPPVLDSDGSFFLYSKLTVDKSRWQQGNVFSCSVMHEALHNHYTQKSLSLSPGK

SEQ ID NO: 7 - protein, 462 aa, Homo sapiens
RITLKESGPPLVKPTQTLTLTCSFSGFSLSDFGVGVGWIRQPPGKALEWLAIIYSDDDKRYSPSLNTRLTITKDTSKNQVVLVMTRVSPVDTATYFCAHRRGPTTLWGVPIARGPVNAMDVWGQGITVTISSTSTKGPSVFPLAPSSKSTSGGTAALGCLVKDYFPEPVTVSWNSGALTSGVHTFPAVLQSSGLYSLSSVVTVPSSSLGTQTYICNVNHKPSNTKVDKKVEPKSCDKTHTCPPCPAPELLGGPSVFLFPPKPKDTLMISRTPEVTCVVVDVSHEDPEVKFNWYVDGVEVHNAKTKPREEQYNSTYRVVSVLTVLHQDWLNGKEYKCKVSNKALPAPIEKTISKAKGQPREPQVYTLPPSRDELTKNQVSLTCLVKGFYPSDIAVEWESNGQPENNYKTTPPVLDSDGSFFLYSKLTVDKSRWQQGNVFSCSVMHEALHNHYTQKSLSLSPGK

SEQ ID NO: 8 - protein, 462 aa, Homo sapiens
RITLKESGPPLVKPTQTLTLTCSFSGFSLSDFGVGVGWIRQPPGKALEWLAIIYSDDDKRYSPSLNTRLTITKDTSKNQVVLVMTRVSPVDTATYFCAHRRGPTTLFGWPIARGPVNAMDVWGQGITVTISSTSTKGPSVFPLAPSSKSTSGGTAALGCLVKDYFPEPVTVSWNSGALTSGVHTFPAVLQSSGLYSLSSVVTVPSSSLGTQTYICNVNHKPSNTKVDKKVEPKSCDKTHTCPPCPAPELLGGPSVFLFPPKPKDTLMISRTPEVTCVVVDVSHEDPEVKFNWYVDGVEVHNAKTKPREEQYNSTYRVVSVLTVLHQDWLNGKEYKCKVSNKALPAPIEKTISKAKGQPREPQVYTLPPSRDELTKNQVSLTCLVKGFYPSDIAVEWESNGQPENNYKTTPPVLDSDGSFFLYSKLTVDKSRWQQGNVFSCSVMHEALHNHYTQKSLSLSPGK

SEQ ID NO: 9 - protein, 462 aa, Homo sapiens
RITLKESGPPLVKPTQTLTLTCSFSGFSLSDFGVGVGWIRQPPGKALEWLAIIYSDDDKRYSPSLNTRLTITKDTSKNQVVLVMTRVSPVDTATYFCAHRRGPTTWFGWPIARGPVNAMDVWGQGITVTISSTSTKGPSVFPLAPSSKSTSGGTAALGCLVKDYFPEPVTVSWNSGALTSGVHTFPAVLQSSGLYSLSSVVTVPSSSLGTQTYICNVNHKPSNTKVDKKVEPKSCDKTHTCPPCPAPELLGGPSVFLFPPKPKDTLMISRTPEVTCVVVDVSHEDPEVKFNWYVDGVEVHNAKTKPREEQYNSTYRVVSVLTVLHQDWLNGKEYKCKVSNKALPAPIEKTISKAKGQPREPQVYTLPPSRDELTKNQVSLTCLVKGFYPSDIAVEWESNGQPENNYKTTPPVLDSDGSFFLYSKLTVDKSRWQQGNVFSCSVMHEALHNHYTQKSLSLSPGK

SEQ ID NO: 10 - protein, 214 aa, Homo sapiens
ALQLTQSPSSLSASVGDRITITCRASQGVTSALAWYRQKPGSPPQLLIYDASSLESGVPSRFSGSGSGTEFTLTISTLRPEDFATYYCQQLHFYPHTFGGGTRVDVRRTVAAPSVFIFPPSDEQLKSGTASVVCLLNNFYPREAKVQWKVDNALQSGNSQESVTEQDSKDSTYSLSSTLTLSKADYEKHKVYECEVTHQGLSSPVTKSFNRGEC

SEQ ID NO: 11 - protein, 297 aa, Human Immunodeficiency Virus
EVLEADKWAILGATKYAGIAATAYCRSVVPGNKWDCVQCQKWVPDGKIITTFTSLLSDTNGYVLRSDKQKTIYLVFRGTNSFRSAITDIVFNFSDYKPVKGAKVHAGFLSSYEQVVNDYFPVVQEQLTAHPTYKVIVTGHSLGGAQALLAGMDLYQREPRLSPANLSIFTVGGPRVGNPTFAYYVESTGIPFARTVHKRDIVPHVPPQSFGFLHPGVESWIKSGTSNVQVCGSAIETKDCSNSIVPFTSILDHLSYFDINEGSCLSGLVPRGSGSHHHHHHGGLNDIFEAQKIEWHE

SEQ ID NO: 12 - protein, 297 aa, Human Immunodeficiency Virus
EVLEADEWAILGATKYAGIAATAYCRSVVPGNKWDCVQCQKWVPDGKIITTFTSLLSDTNGYVLRSDKQKTIYLVFRGTNSFRSAITDIVFNFSDYKPVKGAKVHAGFLSSYEQVVNDYFPVVQEQLTAHPTYKVIVTGHSLGGAQALLAGMDLYQREPRLSPANLSIFTVGGPRVGNPTFAYYVESTGIPFARTVHKRDIVPHVPPQSFGFLHPGVESWIKSGTSNVQVCGSAIETKDCSNSIVPFTSILDHLSYFDINEGSCLSGLVPRGSGSHHHHHHGGLNDIFEAQKIEWHE

SEQ ID NO: 13 - protein, 297 aa, Human Immunodeficiency Virus
EVLALDSWKNLGATKYAGIAATAYCRSVVPGNKWDCVQCQKWVPDGKIITTFTSLLSDTNGYVLRSDKQKTIYLVFRGTNSFRSAITDIVFNFSDYKPVKGAKVHAGFLSSYEQVVNDYFPVVQEQLTAHPTYKVIVTGHSLGGAQALLAGMDLYQREPRLSPANLSIFTVGGPRVGNPTFAYYVESTGIPFARTVHKRDIVPHVPPQSFGFLHPGVESWIKSGTSNVQVCGSAIETKDCSNSIVPFTSILDHLSYFDINEGSCLSGLVPRGSGSHHHHHHGGLNDIFEAQKIEWHE

SEQ ID NO: 14 - protein, 212 aa, Human Immunodeficiency Virus
ASDPVRQYLHEIGEVLELDKWAELGAAAKVEEGMEAIKKLSEATGLDQELIREVVRAKILGTAAIQKIPGLKEKPDPKTVEEVDGKLKSLPKELKRYLHIAREGEAARQHLIEANLRLVVSIAKKYTGRGLSFLDLIQEGNQGLIRAVEKFEYKRGFAFSTYATWWIRQAINRAIADQARSGLVPRGSGSHHHHHHGGLNDIFEAQKIEWHE

SEQ ID NO: 15 - protein, 212 aa, Human Immunodeficiency Virus
ASDPVRQYLHEIGEVLELDEWAELGAAAKVEEGMEAIKKLSEATGLDQELIREVVRAKILGTAAIQKIPGLKEKPDPKTVEEVDGKLKSLPKELKRYLHIAREGEAARQHLIEANLRLVVSIAKKYTGRGLSFLDLIQEGNQGLIRAVEKFEYKRGFAFSTYATWWIRQAINRAIADQARSGLVPRGSGSHHHHHHGGLNDIFEAQKIEWHE

SEQ ID NO: 16 - protein, 212 aa, Human Immunodeficiency Virus
ASDPVRQYLHEIGEVLALDSWKNLGAAAKVEEGMEAIKKLSEATGLDQELIREVVRAKILGTAAIQKIPGLKEKPDPKTVEEVDGKLKSLPKELKRYLHIAREGEAARQHLIEANLRLVVSIAKKYTGRGLSFLDLIQEGNQGLIRAVEKFEYKRGFAFSTYATWWIRQAINRAIADQARSGLVPRGSGSHHHHHHGGLNDIFEAQKIEWHE

SEQ ID NO: 17 - protein, 294 aa, Human Immunodeficiency Virus
EILELDKWAILGMRVAGRLAAEVLEMIEPYVKPGVSTGELDRICNDYIVNEQHAVSACLGYHGYPKSVCISINEVVCHGIPDDAKLLKDGDIVNIDVTVIKAGAHGDTSKMFIVGKPTIMGERLCRITQESLYLALRMVKPGINLREIGAAIQKFVEAEGFSVVREYCGHGIGGGFHEEPQVLHYDSRETNVVLKPGMTFTIEPMVNAGKKEIRTMKDGWTVKTKDRSLSAQYEHTIVVTDNGCEILTLRKDDTIPAIISHDSGLVPRGSGSHHHHHHGGLNDIFEAQKIEWHE

SEQ ID NO: 18 - protein, 294 aa, Human Immunodeficiency Virus
EILELDEWAILGMRVAGRLAAEVLEMIEPYVKPGVSTGELDRICNDYIVNEQHAVSACLGYHGYPKSVCISINEVVCHGIPDDAKLLKDGDIVNIDVTVIKAGAHGDTSKMFIVGKPTIMGERLCRITQESLYLALRMVKPGINLREIGAAIQKFVEAEGFSVVREYCGHGIGGGFHEEPQVLHYDSRETNVVLKPGMTFTIEPMVNAGKKEIRTMKDGWTVKTKDRSLSAQYEHTIVVTDNGCEILTLRKDDTIPAIISHDSGLVPRGSGSHHHHHHGGLNDIFEAQKIEWHE

SEQ ID NO: 19 - protein, 294 aa, Human Immunodeficiency Virus
EILALDSWKNLGMRVAGRLAAEVLEMIEPYVKPGVSTGELDRICNDYIVNEQHAVSACLGYHGYPKSVCISINEVVCHGIPDDAKLLKDGDIVNIDVTVIKAGAHGDTSKMFIVGKPTIMGERLCRITQESLYLALRMVKPGINLREIGAAIQKFVEAEGFSVVREYCGHGIGGGFHEEPQVLHYDSRETNVVLKPGMTFTIEPMVNAGKKEIRTMKDGWTVKTKDRSLSAQYEHTIVVTDNGCEILTLRKDDTIPAIISHDSGLVPRGSGSHHHHHHGGLNDIFEAQKIEWHE

SEQ ID NO: 20 - protein, 209 aa, Human Immunodeficiency Virus
DAASDLKSRLDKVSSFGAGFTQKVTDVQEGQGALAVKRPNLFAWHMTQPDESILVSDGKTLWFYNPFVEQATATWLKDATGNTPFMLIARNQSSDWQQYNIKQNGDDFVLTPKASNGNLKQFTINVGRDGTIHQFSAVEQDDQRSSYQLKAQENLEVDKWAFLFGPPQGVTVDDQRKSGLVPRGSGSHHHHHHGGLNDIFEAQKIEWHE

SEQ ID NO: 21 - protein, 209 aa, Human Immunodeficiency Virus
DAASDLKSRLDKVSSFGAGFTQKVTDVQEGQGALAVKRPNLFAWHMTQPDESILVSDGKTLWFYNPFVEQATATWLKDATGNTPFMLIARNQSSDWQQYNIKQNGDDFVLTPKASNGNLKQFTINVGRDGTIHQFSAVEQDDQRSSYQLKAQENLEVDEWAFLFGPPQGVTVDDQRKSGLVPRGSGSHHHHHHGGLNDIFEAQKIEWHE

SEQ ID NO: 22 - protein, 209 aa, Human Immunodeficiency Virus
DAASDLKSRLDKVSSFGAGFTQKVTDVQEGQGALAVKRPNLFAWHMTQPDESILVSDGKTLWFYNPFVEQATATWLKDATGNTPFMLIARNQSSDWQQYNIKQNGDDFVLTPKASNGNLKQFTINVGRDGTIHQFSAVEQDDQRSSYQLKAQENLAVDSWKNLFGPPQGVTVDDQRKSGLVPRGSGSHHHHHHGGLNDIFEAQKIEWHE

SEQ ID NO: 23 - protein, 113 aa, Human Immunodeficiency Virus
SKMLQHIDYRMRCIGGAGGIAIGTFKAFGAGMGLILCDCDAFAKIKPKNSKQAEREEKAVGELLELDKWALLSMTVEGPPPSGLVPRGSGSHHHHHHGGLNDIFEAQKIEWHE

SEQ ID NO: 24 - protein, 113 aa, Human Immunodeficiency Virus
SKMLQHIDYRMRCIGGAGGIAIGTFKAFGAGMGLILCDCDAFAKIKPKNSKQAEREEKAVGELLELDEWALLSMTVEGPPPSGLVPRGSGSHHHHHHGGLNDIFEAQKIEWHE

SEQ ID NO: 25 - protein, 113 aa, Human Immunodeficiency Virus
SKMLQHIDYRMRCIGGAGGIAIGTFKAFGAGMGLILCDCDAFAKIKPKNSKQAEREEKAVGELLALDSWKNLSMTVEGPPPSGLVPRGSGSHHHHHHGGLNDIFEAQKIEWHE

SEQ ID NO: 26 - protein, 14 aa, Human Immunodeficiency Virus
LNDIFEAQKIEWHE

SEQ ID NO: 27 - protein, 130 aa, Homo sapiens
QVQLVQSGAVIKTPGSSVKISCRASGYNFRDYSIHWVRLIPDKGFEWIGWIKPLWGAVSYARQLQGRVSMTRQLSQDPDDPDWGVAYMEFSGLTSPADTAEYFCVRRGSCDYCGDFPWQYWGQGTWWSSA

SEQ ID NO: 28 - protein, 102 aa, Homo sapiens
EIVLTQSPGILSLSPGETATLFCKASQGGNAMTWYQKRRGQVPRLLIYDTSRRASGVPDRFVGSGSGTDFFLTINKLDREDFAVYYCQQFEFFGLGSELEVH

SEQ ID NO: 29 - DNA, 365 bp, Homo sapiens
caggtgcagctggtgcagtctgggggtcagatgaagaagcctggcgagtcgatgagaatttcttgtcgggcttctggatatgaatttattgattgtacgctaaattggattcgtctggcccccggaaaaaggcctgagtggatgggatggctgaagcctcgggggggggccgtcaactacgcacgtccacttcagggcagagtgaccatgactcgagacgtttattccgacacagcctttttggagctgcgctcgttgacagtagacgacacggccgtctacttttgtactaggggaaaaaactgtgattacaattgggacttcgaacactggggccggggcaccccggtcatcgtctcatcacc

SEQ ID NO: 30 - DNA, 312 bp, Homo sapiens
gaaattgtgttgacacagtctccaggcaccctgtctttgtctccaggggaaacagccatcatctcttgtcggaccagtcagtatggttccttagcctggtatcaacagaggcccggccaggcccccaggctcgtcatctattcgggctctactcgggccgctggcatcccagacaggttcagcggcagtcggtgggggccagactacaatctcaccatcagcaacctggagtcgggagattttggtgtttattattgccagcagtatgaattttttggccaggggaccaaggtccaggtcgacattaagcga

SEQ ID NO: 31 - DNA, 366 bp, Homo sapiens
caggtgcagctggtgcagtctgggggccagatgaagaagcctggcgagtcgatgagaatttcttgtcaggcttccggatatgaatttattgattgtacactaaattgggttcgcctggcccccggaagaaggcctgaatggatgggatggctgaagcctcgagggggggccgtcaactacgcacgtccacttcaaggcagagtgaccatgactcgagacgtgtattccgacacagcctttttggagctgcgctccttgacagcagacgacacggccgtctactattgtactaggggaaaaaattgtgattacaattgggacttcgaacactggggccggggtaccccggtcaccgtctcatcagcc

SEQ ID NO: 32 - DNA, 312 bp, Homo sapiens
gaaattgtgttgacacagtctccaggcaccctgtctttgtctccaggggaaacagccatcatctcttgtcggaccagtcagtatggttccttagcctggtatcaacagaggcccggccaggccccccggctcgtcatctattcgggctctactcgggccgcaggcatcccagacaggttcagcggcagtcggtgggggccagactacaatctcaccatcaggaacctggagtcgggagattttggtctttattattgccagcagtatgaattttttggccaggggaccaaggtccaggtcgacattaagcga

SEQ ID NO: 33 - DNA, 394 bp, Homo sapiens
caggtgcagctggtgcagtctggggctgtgattaagacgcctgggtcctcagtgaagatctcatgtcgggcttctggatacaactttcgtgattattcgatccattgggtccgcctcattcctgacaagggatttgagtggattggatggattaaacctctgtggggtgccgtcagttatgcccggcaacttcagggccgagtctctatgactcgacaattatctcaagacccagacgacccggactggggcgttgcctacatggagttcagtggactgacgtcccgccgacacggccgaatatttttgtgtccggagagggtcctgtgattattgcggagactttccctggcaatactggggtcagggcaccgtcgtcgtcgtctcgtcagcg

SEQ ID NO: 34 - DNA, 309 bp, Homo sapiens
gaaattgtgttgacgcagtctcccggcatcctgtctctgtctccaggagagacagccaccctcttttgtaaggccagtcagggtggcaatgctatgacgtggtatcagaagagacgtggccaggttcccagactcctgatctacgatacatctcgcagggcctctggcgttcctgacagatttgttggcagtgggtctgggacagacttctttctcacgatcaacaaattggaccgggaagatttcgcagtctattattgtcaacaatttgaattttttggcctggggagcgagctggaagtccatcga

SEQ ID NO: 35 - protein, 1483 aa, Artificial sequence
  Recombinant nucleic acid product.
ATGGGATGGTCATGTATCATCCTTTTTCTAGTAGCAACTGCAACCGGTGTACATTCCCAGGTGCAGCTGGTGCAGTCTGGAGGTCAGATGAAGAAGCCTGGCGAGTCGATGAGAATTTCTTGTCGGGCTTCTGGATATGAATTTATTGATTGTACGCTAAATTGGATTCGTCTGGCCCCCGGAAAAAGGCCTGAGTGGATGGGATGGCTGAAGCCTCGGGGGGGGGCCGTCAACTACGCACGTCCACTTCAGGGCAGAGTGACCATGACTCGAGACGTTTATTCCGACACAGCCTTTTTGGAGCTGCGCTCGTTGACAGTAGACGACACGGCCGTCTACTTTTGTACTAGGGGAAAAAACTGTGATTACAATTGGGACTTCGAACACTGGGGCCGGGGCACCCCGGTCATCGTCTCATCAGGAGGGGGAAGCGGAGGGGGAAGCGGAGGGGGAAGCGGAGGGGGATCCGAAATTGTGTTGACACAGTCTCCAGGCACCCTGTCTTTGTCTCCAGGGGAAACAGCCATCATCTCTTGTCGGACCAGTCAGTATGGTTCCTTAGCCTGGTATCAACAGAGGCCCGGCCAGGCCCCCAGGCTCGTCATCTATTCGGGCTCTACTCGGGCCGCTGGCATCCCAGACAGGTTCAGCGGCAGTCGGTGGGGGCCAGACTACAATCTCACCATCAGCAACCTGGAGTCGGGAGATTTTGGTGTTTATTATTGCCAGCAGTATGAATTTTTTGGCCAGGGGACCAAGGTCCAGGTCGACATTAAAGAGCCCAAATCTTGTGACAAAACTCACACATGCCCACCGTGCCCAGCACCTGAACTCCTGGGGGGACCGTCAGTCTTCCTCTTCCCCCCAAAACCCAAGGACACCCTCATGATCTCCCGGACCCCTGAGGTCACATGCGTGGTGGTGGACGTGAGCCACGAAGACCCTGAGGTCAAGTTCAACTGGTACGTGGACGTGGACGGCGTGGAGGTGCATAATGCCAAGACAAAGCCGCGGGAGGAGCAGTACAACAGCACGTACCGTGTGGTCAGCGTCCTCACCGTCCTGCACCAGGACTGGCTGAATGGCAAGGAGTACAAGTGCAAGGTCTCCAACAAAGCCCTCCCAGCCCCCATCGAGAAAACCATCTCCAAAGCCAAAGGGCAGCCCCGAGAACCACAGGTGTACACCCTGCCCCCATCCCGGGATGAGCTGACCAAGAACCAGGTCAGCCTGACCTGCCTGGTCAAAGGCTTCTATCCCAGCGACATCGCCGTGGAGTGGGAGAGCAATGGGCAGCCGGAGAACAACTACAAGACCACGCCTCCCGTGCTGGACTCCGACGGCTCCTTCTTCCTCTACAGCAAGCTCACCGTGGACAAGAGCAGGTGGCAGCAGGGGAACGTCTTCTCATGCTCCGTGATGCATGAGGCTCTGCACAACCACTACACGCAGAAGAGCCTCTCCCTGTCTCCGGGTAAAATGA

SEQ ID NO: 36 - protein, 19 aa, Human Immunodeficiency Virus
MYSMQLASCVTLTLVLLVN

SEQ ID NO: 37 - protein, 78 aa, Human Immunodeficiency Virus
PLCVTLHCTTAKLTNVTNITNVPNIGNITDEVRNCSFNMTTEIRDKKQKVHALFYKLDIVQIEDKNDSSKYRLINCNT

SEQ ID NO: 38 - protein, 21 aa, Human Immunodeficiency Virus
NMRTSMRIGPGQVFYRTGSIT

SEQ ID NO: 39 - protein, 6 aa, Artificial sequence
  Linker peptide
GGSGSG

SEQ ID NO: 40 - protein, 23 aa, Human Immunodeficiency Virus
QELLELDKWASLGGTETSQVAPA

SEQ ID NO: 41 - protein, 119 aa, Homo sapiens
QVQLVQSGAEVKKPGASVKVSCKASGYTFTGYYMHWVRQAPGQGLEWMGWINPNSGGTNYAQKFQGRVTMTRDTSISTAYMELSRLRSDDTAVYYCARDYVWAEYFQHWGQGTLVTVSS

SEQ ID NO: 42 - protein, 101 aa, Homo sapiens
EIVLTQSPATLSLSPGERATLSCRASQYSVSSYLAWYQQKPGQAPRLLIYDASNRATGIPARFSGSGSGRDFTLTISSLEPEDFAVYYCQQFGQGTKLEIK

SEQ ID NO: 43 - protein, 96 aa, Homo sapiens
EIVLTQSPGTLSLSPGERATLSCRASQSVSSSYLAWYQQKPGQAPRLLIYGASSRATGIPDRFSGSGSGTDFTLTISRLEPEDFAVYYCQQYGSSP

SEQ ID NO: 44 - protein, 353 aa, Homo sapiens [sequence omitted]

SEQ ID NO: 45 - protein, 355 aa, Homo sapiens
VWKEATTTLFCASDAKAYDTEVHNVWATHACVPTDPNPQEVVLVNVTENFNMWKNDMVEQMHEDIISLWDQSLKPCVKLTPLCVGAGSCNTSVITQACPKVSFEPIPIHYCAPAGFAILKCNNKTFNGTGPCTNVSTVQCTHGIRPVVSTQLLLNGSLAEEEVVIRSVNFTDNAKTIIVQLNTSVEINCTGAHCNISRAKWNNTLKQIASKLREQFGNNKTIIFKQSSGGDPEIVTHSFNCGGEFFYCNSTQLFNSTWFNSTWSTEGSNNTEGSDTITLPCRIKQIINMWQKVGKAMYAPPISGQIRCSSNITGLLLTRDGGNSNNESEIFRPGGGDMRDNWRSELYKYKVVKIE

SEQ ID NO: 46 - protein, 46 aa, Homo sapiens
SNTTGILLTRDGGANNTSNETFRPGGGNIKDNWRSELYKYKVVQIE

SEQ ID NO: 47 - protein, 6 aa, Artificial sequence
  Recombinant peptide product.
LFGVPI

SEQ ID NO: 48 - protein, 6 aa, Artificial sequence
  Recombinant peptide product.
SFGVPI

SEQ ID NO: 49 - protein, 6 aa, Artificial sequence
  Recombinant product.
LSGVPI

SEQ ID NO: 50 - protein, 6 aa, Artificial sequence
  Recombinant product.
LFGSPI

SEQ ID NO: 51 - protein, 6 aa, Artificial sequence
  Recombinant product.
LFGVPS

SEQ ID NO: 52 - protein, 6 aa, Artificial sequence
  Recombinant product.
SSGVPI

SEQ ID NO: 53 - protein, 6 aa, Artificial sequence
  Recombinant product.
SFGSPI

SEQ ID NO: 54 - protein, 6 aa, Artificial sequence
  Recombinant product.
LSGVPS

SEQ ID NO: 55 - protein, 6 aa, Artificial sequence
  Recombinant product.
WFGVPI

SEQ ID NO: 56 - protein, 6 aa, Artificial sequence
  Recombinant product.
LWGVPI

SEQ ID NO: 57 - protein, 6 aa, Artificial sequence
  Recombinant product.
LFGWPI

SEQ ID NO: 58 - protein, 6 aa, Artificial sequence
  Recombinant product.
WFGWPI

SEQ ID NO: 59 - protein, 1478 aa, Artificial sequence
  Recombinant nucleic acid product.
ATGGGATGGTCATGTATCATCCTTTTTCTAGTAGCAACTGCAACCGGTGTACATTCAGAAATTGTGTTGACACAGTCTCCAGGCACCCTGTCTTTGTCTCCAGGGGAAACAGCCATCATCTCTTGTCGGACCAGTCAGTATGGTTCCTTAGCCTGGTATCAACAGAGGCCCGGCCAGGCCCCCAGGCTCGTCATCTATTCGGGCTCTACTCGGGCCGCTGGCATCCCAGACAGGTTCAGCGGCAGTCGGTGGGGGCCAGACTACAATCTCACCATCAGCAACCTGGAGTCGGGAGATTTTGGTGTTTATTATTGCCAGCAGTATGAATTTTTTGGCCAGGGGACCAAGGTCGACATTAAAGGAGGGGGAAGCGGAGGGGGAAGCGGAGGGGGAAGCGGAGGGGGATCCCCAGGTGCAGCTGGTGCAGTCTGGAGGTCAGATGAAGAAGCCTGGCGAGTCGATGAGAATTTCTTGTCGGGCTTCTGGATATGAATTTATTGATTGTACGCTAAATTGGATTCGTCTGGCCCCCGGAAAAAGGCCTGAGTGGATGGGATGGCTGAAGCCTCGGGGGGGGGCCGTCAACTACGCACGTCCACTTCAGGGCAGAGTGACCATGACTCGAGACGTTTATTCCGACACAGCCTTTTTGGAGCTGCGCTCGTTGACAGTAGACGACACGGCCGTCTACTTTTGTACTAGGGGAAAAAACTGTGATTACAATTGGGACTTCGAACACTGGGGCCGGGGCACCCCGGTCATCGTCTCATCAGAGCCCAAATCTTGTGACAAAACTCACACATGCCCACCGTGCCCAGCACCTGAACTCCTGGGGGGACCGTCAGTCTTCCTCTTCCCCCCAAAACCCAAGGACACCCTCATGATCTCCCGGACCCCTGAGGTCACATGCGTGGTGGTGGACGTGAGCCACGAAGACCCTGAGGTCAAGTTCAACTGGTACGTGGACGTGGACGGCGTGGAGGTGCATAATGCCAAGACAAAGCCGCGGGAGGAGCAGTACAACAGCACGTACCGTGTGGTCAGCGTCCTCACCGTCCTGCACCAGGACTGGCTGAATGGCAAGGAGTACAAGTGCAAGGTCTCCAACAAAGCCCTCCCAGCCCCCATCGAGAAAACCATCTCCAAAGCCAAAGGGCAGCCCCGAGAACCACAGGTGTACACCCTGCCCCCATCCCGGGATGAGCTGACCAAGAACCAGGTCAGCCTGACCTGCCTGGTCAAAGGCTTCTATCCCAGCGACATCGCCGTGGAGTGGGAGAGCAATGGGCAGCCGGAGAACAACTACAAGACCACGCCTCCCGTGCTGGACTCCGACGGCTCCTTCTTCCTCTACAGCAAGCTCACCGTGGACAAGAGCAGGTGGCAGCAGGGGAACGTCTTCTCATGCTCCGTGATGCATGAGGCTCTGCACAACCACTACACGCAGAAGAGCCTCTCCCTGTCTCCGGGTAAAATGA

SEQ ID NO: 60 - DNA, 369 bp, Homo sapiens
caggtgcagctggtgcagtctggggctgtgattaagacgcctgggtcctcagtgaagatctcatgtcgggcttctggatacaactttcgtgattattcgatccattgggtccgcctcattcctgacaagggatttgagtggattggatggattaaacctctgtggggtgccgtcagttatgcccggcaacttcagggccgagtctctatgactcgacaattatctcaagacccagacgacccggacgtgggcgttgcctacatggagttcagtggactgacgcccgccgacacggccgaatatttttgtgtccggagagggtcctgtgattattgcggagactttccctggcaatactggggtcagggc

SEQ ID NO: 61 - DNA, 440 bp, Homo sapiens
caggtgcagctggtgcagtctggggctgtgattaagacgcctgggtcctcagtgaagatctcatgtcgggcttctggatacaactttcgtgattattcgatccattgggtccgcctcattcctgacaagggatttgtgtggattggatggattaaacctctgtggggtgccgtcagttatgcccggcaacttcagggccgagtctctatgactcgacaattatctcaagacccagacgacccggactggggcgttgcctacatggagttcagtggactgacgcccgccgacacggccgaatatttttgtgtccggagagggtcctgtgattattgcggagactttccctggcaatactggggtcagggcaccgtcgtcgtcgtctcgtcagcgtcgaccaaggcccatcggtcttcccctggccaccctcctccaagacg

SEQ ID NO: 62 - DNA, 437 bp, Homo sapiens
  misc_feature (309)..(309): n is a, c, g, or t
caggtgcagctggtgcagtctggggctgtgattaagacgcctgggtcctcagtgaagatctcatgtcgggcttctggatacaactttcgtgattattcgatccattgggtccgcctcattcctgacaagggatttgagtggattggatggattaaacctctgtggggtgccgtcagttatgcccggcaacttcagggccgagtctctatgactcgacaattatctcaagacccagacgacccggactggggcgttgcctacatggagttcagtggactgacgcccgccgacacggccgaatatttttgngtccggagagggtcctgtgattattgcggagactttccctggcaatactggggtcagggcaccgtcgtcgtcgtctcgtcagcgccgaccaaggcccatcggtcttccccctggccaccctcctccaa

SEQ ID NO: 63 - DNA, 390 bp, Homo sapiens
caggtgcagctggtgcagtctggggctgtgattaagacgcctgggtcctcagtgaagatctcatgtcgggcttctggatacaactttcgtgattattcgatccattgggtccgcctcattcctgacaagggatttgagtggattggatggattaaacctctgtgtggtgccgtcagttatgcccggcaacttcagggccgagtctctatgactcgacaattatctcaagacccagacgacccggactggggcgttgcctacatggagttcagtggactgacgcccgccgacacggccgaatattttgtgtccggagagggtcctgtgattattgcggagactttccctggcaatacgtggggtcagggcaccgtcgtcgtcgtctcgtca

SEQ ID NO: 64 - DNA, 399 bp, Homo sapiens
caggtgcagctggtgcagtctggggctgtgattaagacgcctgggtcctcagtgaagatctcatgtcgggcttctggatacaactttcgtgattattcgatccattgggtccgcctcattcctgacaagggatttgagtggattggatggattaaacctctgtggggtgccgtcagttatgcccggcaacttcagggccgagtctctatgactcgacaattatctcaagacccagacgacccggactggggcgttgcctacatggagttcagtggactgacgcccgccgacacggccgaatatttttgtgtccggagagggtcctgtgattattgcggagactttccctggcaatactggggtcagggcaccgtcgtcgtcgtctcgtcagcgtcgacc

SEQ ID NO: 65 - DNA, 399 bp, Homo sapiens; identical to SEQ ID NO: 64

SEQ ID NO: 66 - DNA, 399 bp, Homo sapiens; identical to SEQ ID NO: 64

SEQ ID NO: 67 - DNA, 377 bp, Homo sapiens
caggtgcagctggtgcagtctgatgctgacctgaggaagcccggggcctcagtgaaggtctcctgtaaggcctctggatatatattcaaaaatcaatatatacactgggtgcgacaggcccctggacgagggtttgagtggatgggacatctcaacccttggagcgggggcacagtttatgcacagaagttccaggacaggctttccatgaccagggacatgtccacaagtacagcctatatggaattgaggagcttgacatctgacgacacggccaactacttttgtctcactgcaataattgatgtcgtctactggggccagggaacggtggtcaccgtctcctcagcctccaccaagggcccatcggtcttccc

SEQ ID NO: 68 - DNA, 367 bp, Homo sapiens
caggtgcagctggtgcagtctgggactgaagtgaagaagtctggggcctcactgaaaatctcctgtatgacagcaggatacactttcagcgcccactacattcactgggtgcgacaggcccctggacaaggccttgagtggatgggatggatcaaccctgccactggtgacacaaaatttgtccagacttttcaggggagacttgccatgacaagggacacgaccaccgacacggtcaacctgattttggccagtgtaaaaccgaatgacacggccacatattattgcgcgagagattggcagtttcaagtcacttttggcgacttttacatggacatctggggcaacgggaccacagtcatcgtct

SEQ ID NO: 69 - DNA, 402 bp, Homo sapiens
  misc_feature (306)..(306): n is a, c, g, or t
caggtgcagctggtgcagtctgatgctgacctgaggaaccccggggcctcagtgaaggtctcctgtaaggcctctggatatatattcaaaaatcaatatatacactgggtgcgacaggcccctggacaagggtttgagtggatgggacatctcaacccttggagcgggggcacagtttatgcacagaagttccaggacaggctttccatgaccagggacatgtccacaagtacagcctatatggaattgaggagcttgacatctgacgacacggccaactacttttgctcactgcaataattggtntcgtctacgtggggccagggaacggtggtcaccgtctcctcagcctccaccaagggcccatcggtccttcccctcggccaccctcctccaacgacg

SEQ ID NO: 70 - DNA, 347 bp, Homo sapiens
caggtgcagctggtgcagtctgatgctgacctgaggaaccccggggcctcagtgaaggtctcctgtaaggcctctggatatatattcaaaaatcaatatatacactgggtgcgacaggcccctggacaagggtttgagtggatgggacatctcaacccttggagcgggggcacagtttatgcacagaagttccaggacaggctttccatgaccagggacatgtccacaagtacagcctatatggaattgaggagcttgacatctgacgacacggccaacttacttttgctcactgcaatattggtgtcgtctacgtggggccagggaacgtggtcaccgtctcctca

SEQ ID NO: 71 - DNA, 395 bp, Homo sapiens
caggtgcagctggtgcagtctggggctgatgtgaagaagcctgggacatcagtaaaggtctcctgcaaggcttctggagacgccttcagcgactattatctacactgggtgcgacaggtcccaggacaaggccttgagtggatgggctggatggacccaaacaatggtgccacaaactatgcacccaagtttcagggcatgatcattatgaccagagacacgtccatcaatacagtttatttggagttgaggaggctgagatccgacgacacggccgtctatttttgtacgagagatgccagcgggccccagacgtattactatgacagtagtggttttgaatttgactcctggggccagggaacgctggtcattgtctcctcagcctccaccaa

SEQ ID NO: 72 - DNA, 367 bp, Homo sapiens
caggtgcagctggtgcaatctgggactgaaatgaagaagtctggggcctcactgaaagtctcctgtaagacctctggatacactttcagcgcccactacattcactgggtgcgccaggcccctggacagggccttgagtggatgggatggatcaaccctgacagtggtgccacaaaatttggccaggcttttcagggtagaatttctatgacaagagacacgtccaccgacacagtcaacctattattggtcaatttgagaccaaacgacacggccacatattactgcgcgagagattggcaatttcaagtcacttttggcgacttttatatggacatctggggcaacgggaccacggtcatcgtct

SEQ ID NO: 73 - DNA, 383 bp, Homo sapiens
caggtgcagctggtgcaatctgggactgaaatgaagaagtctggggcctcactgaaagtctcctgtaagacctctggatacactttcagcgcccactacattcactgggtgcgccaggcccctggacaaggccttgagtggatgggttggatcaaccctgacagtggtgacacaaattttgcccagacttttcagggtaggactaccttgacaagagacgcgttcgccaacacagtcaacctactattggccagtctgaaaccgaacgacacggccacatactactgcgcgagagattggcaatttcaaggcacttttggcgacttttacatggacatctggggcaacgggaccacggtcatcgtctccccagcctccaccaa

SEQ ID NO: 74 - DNA, 438 bp, Homo sapiens
caggtgcagctggtgtaatctgggactgaaatgaagaagtctggggcctcactgaaagtctcctgtaagacctctggatacactttcagcgcccactacattcactgggtgcgccaggcccctggacaaggccttgagtggatgggttggatcaaccctgacagtggtgacacaaattttgcccagacttttcagggtaggactaccttgacaagagacgcgttcgccaacacagtcaacctactattggccagtctgaaaccgaacgacacggccacatattactgcgcgagagattggcaatttcaaggcacttttggcgacttttacatggacatctggggcaacgggaccacggtcatcgtctcccagcctccaccaggcccatcggtcttcccctggccaccctcctccaagacgcacctcgtcggggcacga

SEQ ID NO: 75 - DNA, 391 bp, Homo sapiens
caggtgcagctggtgcaatctgggactgaaatgaagaagtctggggcctcactgaaagtctcctgtaagacctctggatacactttcagcgcccactacattcactgggtgcgccaggcccctggacaaggccttgagtggatgggttggatcaaccctgacagtggtgacacaaattttgcccagacttttcagggtaggactaccttgacaagagacgcgttcgccaacacagtcaacctactattggccagtctgaaaccgaacgacacggccacatattactgcgcgagagattggcaatttcaaggcacttttggcgacttttacatggacatctggggcaacgggaccacggtcatcgtctccccagcctccaccaacgggccca

SEQ ID NO: 76 - DNA, 367 bp, Homo sapiens
caggtgcagctggtgcaatctgggactgaaatgaagaagtctggggcctcactgaaagtctcctgtaagacctctggatacactttcagcgcccactacattcactgggtgcgccaggcccctggacaaggccttgagtggatgggttggatcaaccctgacagtggtgacacaaattttgcccagacttttcagggtaggactaccttgacaagagacgcgttcgccaacacagtcaacctactattggccagtctgaaaccgaacgacacggccacatattactgcgcgagagattggcaatttcaagtcacttttggcgacttttatatggacatctggggcaacgggaccacggtcatcgtct

SEQ ID NO: 77 - DNA, 459 bp, Homo sapiens
caggtgcagctggtgcagtctgggactgaaatgaagaagtctggggcctcactgaaagtctcctgtaagacttctggatacactttcagcgcccactatattcactgggtgcgccaggcccctggacaaggccttgagtggatgggttggatcaaccctgacagtggtgacacacattttgcccagacttttcaggttaggactaccttgacaagagatccgttcaccggcacagtcatcctcctattggccagtctgagaccgaacgacacggccacatattactgcgcgagagattggcaatttcaaggcacttttggcgacttttatatggacatctggggcaacgggaccacggtcatcgtctctccagcctccaccagggcccatcggtcttcccctggcaccctcctccaagacgcacctctggggcacagcggccctggctgcctggtcagg

SEQ ID NO: 78 - DNA, 458 bp, Homo sapiens
caggtgcagctggtgcagtctgggactgaaatgaagaagtctggggcctcagtgaaagtctcctgtgagacatctggatacactttcaccgcctattacattcactgggtgcgacaggcccccggacgaggccttgagtggatgggatggatcaaccctgacagtggggacacaaagtttgcccggacttttcagggtagaaccaccgtgacaagggacacatccaccaatacagtcaacttactactggccagtctacaatcgaacgacacggccacatattactgcgcgagagattggcagtttcaagtcacttttggcgactattatatggacatctggggcaacgggaccacggtcatcgtctccccagcctccaccaaggcccatcggtcttcccctggcaccctcctccaagacgcacctctggggcacagcggcctgggctgcctggtcaa

SEQ ID NO: 79 - DNA, 431 bp, Homo sapiens
caggtgcagctggtgcagtctgggactaaaatgatgaagtctggggcctcaatgaaagtcccttgtaagacatctggatacaccttcaccgcctactatattcactgggtacggcaggcccctggacgaggccttgagtggatgggatggatcaatcctgatagtggtgacacaaactttgcccagacttttaaggacagagtcaatatgacaagggacacgtcaaccaccacagtcaacctggtcttggtcaatttaagaagtgacgacacggccacctattactgcgcgagagattggcagtatcaggtcatttttggcgacttctatttggacatctggggcaacgggaccacggtcatcgtcgtctccagcctccaccaaggcccatcggtcttccccctggccaccctcctccaacgacgccacct

SEQ ID NO: 80 - DNA, 360 bp, Homo sapiens
caggtgcagctggtgcagtctggggcagaagtgaagaagactggggcctcagtgagggtctcctgcgagacctctggataccccttcaccaaccactatatacattgggtgcggcaggcccctggacatgggcttgagtggatggcctggatcaacccgagcggtggtgccacaatttatgcagaggcttttgagggcaggataatggtaagttcggacacgtccttgaatacagtctacatggagttggagagcctgacatctggcgacacggccatgtatttctgcgccagagatgcgactccgataactaccgaatttgacttctggggccagggaacactgatcaccgtctcctca

SEQ ID NO: 81 - DNA, 360 bp, Homo sapiens; identical to SEQ ID NO: 80

SEQ ID NO: 82 - DNA, 360 bp, Homo sapiens
  misc_feature (342)..(342): n is a, c, g, or t
caggtgcagctggtgcagtctggggctgaagtgaagaagcctggggcctcagtgaaggtttcctgtcaggcttctggatacagattcaccgaccaacatttgaattggatacgacaggcccctggacaagggtttgagtggctgggcaggttcaaccctgccaatggcggcacagatcttgcacagaagtttcagggtagggtcagtatgaccagaaacatgtccatcaccacagcgtatttggaactgagcaggctgacatctgacgacacggccacctattattgtctgaattctggttggacgaatgaatatcactatgaccactggggccagggaacnccggtcaccgtctcctca

SEQ ID NO: 83 - DNA, 420 bp, Homo sapiens
caggtgcagctggtgcagtctggggcagaagtgaagaagactggggcctcagtgagggtctcctgcgagacctctggataccccttcaccaaccactatatacattgggtgcggcaggcccctggacatgggcttgagtggatggcctggatcaacccgagcggtggtgccacaatttatgcagaggcttttgagggcaggataatggtaagttcggacacgtccttgaatacagtctacatggagttggagagcctgacatctggcgacacggccatgtatttctgcgccagagatgcgactccgataactaccgaatttgacttctggggccagggacactgatcaccgtctcctcagcctccaccaaggcccatcggtccttccccctcggccaccctcctccaacgacgccacctc

SEQ ID NO: 84 - DNA, 370 bp, Homo sapiens
caggtgcagctggtgcagtctggggctgaagtgaagaagcctggggcctcagtgaaggtctcctgtcaggcttctggatacagattcaccgaccaacatttgaattggatacgacaggcccctggacaagggtttgagtggctgggcaggttcaaccctgccaatggcggcacagatcttgcacagaagtttcagggtagggtcagtatgaccagaaacatgtccatcaccacagcgtatttggaactgagcaggctgacatctgacgacacggccacctattattgtctgaattctggttggacgaatgaatatcactatgaccactggggccagggaacgccggtcaccgtctcctcacgcctccacc

SEQ ID NO: 85 - DNA, 427 bp, Homo sapiens
caggtgcagctggtgcagtctgggactgaggtgaagaagtctggggcctctgtgaaagtctcctgtcagacatctggatacactttcagcgcctactacattcactgggtgcgacaggcccctggacgaggccttgagtggctgggatggatcaaccctgacaatggtgacacaaaatttgcccagaattttcacggtagatccaccgtgacaagggacacatccaccagtacagtcaatttactcctgaccagtctacaaccgaacgacacggccacatattactgcgcgagagattggcagtttcaagtcatttttggcgactactacatggacatctggggcaacgggaccacggtcatcgtctccccagcctccaccaaggcccatcggtctccccctggccaccctcctccaacgacgcacc

SEQ ID NO: 86 - DNA, 371 bp, Homo sapiens
caggtgcagctggtgcagtctgggactgaggtgaagaagtctggggcctctgtgaaagtctcctgtcagacatctggatacactttcagcgcctactacattcactgggtgcgacaggcccctggacgaggccttgagtggctgggatggatcaaccctgacaatggtgacacaaaatttgcccagaattttcacggtagatccaccgtgacaagggacacatccaccagtacagtcaatttactcctgaccagtctacaaccgaacgacacggccacatattactgcgcgagagattggcagtttcaagtcatttttggcgactactacatggacatctggggcaacgggaccacggtcatcgtctcctc

SEQ ID NO: 87 - DNA, 363 bp, Homo sapiens
caggtgcagctggtgcagtctggggctgaagtgaagaagcctggggcctcagtgaaggtctcctgtcaggcttctggatacagattcaccgaccaacatttgaattggatacgacaggcccctggacaagggtttgagtggctgggcaggttcaaccctgccaatggcggcacagatcttgcacagaagtttcagggtagggtcagtatgaccagaaacatgtccatcaccacagcgtatttggaactgagcaggctgacatctgacgacacggccacctattattgtctgaattctggttgacgaatgaatatcactatgaccacgtggggccagggaaccgccggtcaccgtctcctcacg

SEQ ID NO: 88 - DNA, 381 bp, Homo sapiens
caggtgcagctggtgcagtctgggactgaaatgaagaagtctggggcctcaatgaaagtctcttgtaagacatctggatacactttcaccggctactacattcactgggtacgacaggcccctggacggggccttgagtggatgggatggatcaatcctaataatggtgacacaaattttgcccagagttttaaggacagagtcagtatgacaagggacacgtctaccaccacagtcaacctggtcttggccaatttaagaaatgacgacacggccacatattactgcgcgagagattggcagtatcaggtcatttttggcgacttctatttggacatctggggcaacgggaccacgatcatcgtctctccagcctccacc

SEQ ID NO: 89 - DNA, 349 bp, Homo sapiens
caggtgcagctggtgcagtcgggggctgaagtgaagaagcctggggcctcagtgaaggtctcctgtcaggcttctggatacggattcaccgaccaacatttgaattggatacgacaggcccctggacaagggtttgagtggctgggcaggttcaaccctgccaatggcggcacagatcttgcacagaagtttcagggtagggtcagtatgaccagaaacatgtccatcaccacagcgtatttggaactgagcaggctgacatctgacgacacggccacctattattgtctgaattctggttgacgaatgaatatcactatgaccacgtggggccagggaaccgccggtc

SEQ ID NO: 90 - DNA, 370 bp, Homo sapiens
caggtgcagctggtgcagtctggggctgaagtgaagaagcctggggccccagtgaaggtctcctgtcaggcttctggatacagattcaccgaccaacatttgaattggatacgacaggcccctggacaagggtttgagtggctgggcaggttcaaccctgccaatggcggcacagatcttgcacagaagtttcagggtagggtcagtatgaccagaaacatgtccatcaccacagcgtatttggaactgagcaggctgacatctgacgacacggccacctattattgtctgaattctggttgacgaatgaatatcactatgaccacgtggggccagggaacgccggtcaccgtctcctcacgcctccacc

SEQ ID NO: 91 - DNA, 358 bp, Homo sapiens
caggtgcagctggtgcagtcgggggctgaagtgaagaagcctggggcctcagtgaaggcctcctgtcaggcttctggatacagattcaccgaccaacatttgaattggatacgacaggcccctggacaagggtttgagtggctgggcaggttcaaccctgccaatggcggcacagatcttgcacagaagtttcagggtagggtcagtatgaccagaaacatgtccatcaccacagcgtatttggaactgagcaggctgacatctgacgacacggccacctattattgtctgaattctggttgacgaatgaatatcactatgaccacgtggggccagggaacgccggtcaccgtctcct

SEQ ID NO: 92 - DNA, 362 bp, Homo sapiens
caggtgcagctggtgcagtcgggggctgaagtgaagaagcctggggcctcagtgaaggtctcctgtcaggcttctggatacagattcaccgaccaacatttgaattggatacgacaggcccctggacaagggtttgagtggctgggcaggttcaaccctgccaatggcggcacagatcttgcacagaagtttcagggtaggctcagtatgaccagaaacatgtccatcaccacagcgtatttggaactgagcaggctgacatctgacgacacggccacctattattgtctgaattctggttgacgaatgaatatcactatgaccacgtggggccagggaacgccggtcaccgtctcctcacg

SEQ ID NO: 93 - DNA, 360 bp, Homo sapiens
caggtgcagctggtgcagtcgggggctgaagtgaagaagcctggggcctcagtgaaggtctcctgtcaggcttctggatacagattcaccgaccaacatttgaattggatacgacaggcccctggacaagggtttgagtaggctgggcaggttcaaccctgccaatggcggcacagatcttgcacagaagtttcagggtaggtcagtatgaccagaaacatgtccatcaccacagcgtatttggaactgagcaggctgacatctgacgacacggccacctattattgtctgaattctggttgacgaatgaatatcactatgaccacgtggggccagggaacgccggtcaccgtctcctca

SEQ ID NO: 94 - DNA, 366 bp, Homo sapiens
caggtgcagctggtgcagtcgggggctgaagtgaagaagcctggggcctcagtgaaggtctcctgtcaggcttctggatacagattcgccgaccaacatttgaattggatacgacaggcccctggacaagggtttgagtggctgggcaggttcaaccctgccaatggcggcacagatcttgcacagaagtttcagggtagggtcagtatgaccagaaacatgtccatcaccacagcgtatttggaactgagcaggctgacatctgacgacacggccacctattattgtctgaattctggttgacgaatgaatatcactatgaccacgtggggccagggaaccgccggtcaccgtctcctcacgcct

SEQ ID NO: 95 - DNA, 368 bp, Homo sapiens
caggtgcagctggtgcagtcgggggctgaagtgaagaagcctggggcctcagtgaaggtctcctgtcaggcttctggatacagattcaccgaccaacatttgaattggatacgacaagcccctggacaagggtttgagtggctgggcaggttcaaccctgccaatggcggcacagatcttgcacagaagtttcagggtagggtcagtatgaccagaaacatgtccatcaccacagcgtatttggaactgagcaggctgacatctgacgacacggccacctattattgtctgaattctggttgacgaatgaatatcactatgaccacgtggggccagggaaccgccggtcaccgtctcctcacgcctcc

SEQ ID NO: 96 - DNA, 371 bp, Homo sapiens
caggtgcagctggtgcagtctggggctgaagtgaagaagcctggggcctcagtgaaggtctcctgtcaggcttctggatacagattcaccgaccaacatttgaattggatacgacaggcccctggacaagggtttgagtggctgggcaggttcaaccctgccaatggcggcacagatcttgcacagaagtttcagggtagggtcagtatgaccagaaacatgtccatcaccacagcgtatttagaactgagcaggctgacatctgacgacacggccacctattattgtctgaattctggttgacgaatgaatatcactatgaccacgtggggccagggaaccgccggtcaccgtctcctcacgcctccacc

SEQ ID NO: 97 - DNA, 379 bp, Homo sapiens
caggtgcagctggtgcagtctggggctgaagtgaagaagcctggggcctcagtgaaggtctcctgtcaggcttctggatacagattcaccgaccaacatttgaattggatacgacaggcccctggacaagggtttgagtggctgggcaggttcaaccctgccaatggcggcacagatcttgcacagaagtttcagggtagggtcagtatgaccagaaacatgtccatcaccacagcgtatttggaactgagcaggctgacatctgacgacacggccacctattattgtctgaattctggttgacgaatgaatatcactatgaccacgtggggccagggaacgccggtcaccgtctcctcacgcctccaccaacggccca

SEQ ID NO: 98 - DNA, 366 bp, Homo sapiens
caggtgcagctggtgcagtcgggggctgaagtgaagaagcctggggcctcagtgaaggtctcctgtcaggcttctggatacagattcaccgaccaacatttgaattggatacgacaggcccctggacaagggtttgagtggctgggcaggttcaaccctgccaatggcggcacagatcttgcacagaagtttcagggtagggtcagtatgaccagaaacatgtccatcaccacagcgtatttggaactgagcaggctgacatctgacgacacggccacctattattgtctgaattctggttgacgaatgaatatcactatgaccacgtggggccagggaaccgccggtcaccgtctcctcacgcct

SEQ ID NO: 99 - DNA, 371 bp, Homo sapiens
caggtgcagctggtgcagtcgggggctgaagtgaagaagcctggggcctcagtgaaggtctcctgtcaggcttctggatacagattcaccgaccaacattttgaattggatacgacaggcccctggacaagggtttgagtggctgggcaggttcaaccctgccaatggcggcacagatcttgcacagaagtttcagggtaggtcagtatgaccagaaacatgtccatcaccacagcgtatttggaactgagcaggctgacatctgacgacacggccacctattattgtctgaattctggtcgacgaatgaatatcactatgaccacgtggggccagggaaccgccggtcaccgtctcctcacgcctccacc

SEQ ID NO: 100 - DNA, 366 bp, Homo sapiens
caggtgcagctggtgcagtcgggggctgaagtgaagaagcctggggcctcagtgaaggtctcctgtcaggcttctggatacagattcaccgaccaacattttgaattggatacgacaggcccctggacaagggtttgagtggctgggcaggttcaaccctgccaatggcggcacagatcttgcacagaagtttcagggtaggtcagtatgaccagaaacatgtccatcaccacagcgtatttggaactgagcaggctgacatctgacgacacggccacctattattgtctgaattctggttgacgaatgaatatcactatgaccacgtggggccagggaaccgccggtcaccgtctcctcacgcct

SEQ ID NO: 101 - DNA, 380 bp, Homo sapiens
caggtgcagctggtgcagtcgggggctgaagtgaagaagcctggggcctcagtgaaggtctcctgtcaggcttctggatacagattcaccgaccaacatttgaattggatacgacaggcccctggacaagggtttgagtggctgggcaggttcaaccctgccaatggcggcacagatcttgcacagaagtttcagggtagggtcagtatgaccagaaacatgtccatcaccacagcgtatttggaactgagcaggctgacatctgacgacacggccacctattattgtctgaattctggttggacgaatgaatatcactatgaccactggggccagggaacgccggtcaccgtctcctcacgcctccaccaacgggccca

SEQ ID NO: 102 - DNA, 375 bp, Homo sapiens
caggtgcagctggtgcagtctggggctgaagtgaagaagcctggggcctcagtgaaggtctcctgtcaggcttctggatacagattcaccgaccaacatttgaattggatacgacaggcccctggacaagggtttgagtggctgggcaggttcaaccctgccaatggcggcacagatcttgcacagaagtttcagggtagggtcagtatgaccagaaacatgtccatcaccacagcgtatttggaactgagcaggctgacatctgacgacacggccacctattattgtctgaattctggttggacgaatgaatatcactatgaccactggggccagggaacgccggtcaccgtctcctcacgcctccaccaacgg

SEQ ID NO: 103 - DNA, 366 bp, Homo sapiens; identical to SEQ ID NO: 98

SEQ ID NO: 104 - DNA, 404 bp, Homo sapiens
caggtgcagctggtgcagtcgggggctgaagtgaagaagcctggggcctcagtgaaggtctcctgtcaggcttctggatacagattcaccgaccaacatttgaattggatacgacaggcccctggacaagggtttgagtggctgggcaggttcaaccctgccaatggcggcacagatcttgcacagaagtttcagggtagggtcagtatgaccagaaacatgtccatcaccacagcgtatttggaactgagcaggctgacatctgacgacacggccacctattattgtctgaattctggttgacgaatgaatatcactatgaccacgtggggccagggaaccgccggtcaccgtctcctcacgcctccaccaacggcccacgtccggtccttcccccgtcggcc

SEQ ID NO: 105 - DNA, 370 bp, Homo sapiens
caggtgcagctggtgcagtcgggggctgaagtgaagaagcctggggcctcagtgaaggtctcctgtcaggcttctggatacagattcaccgaccaacattttgaattggatacgacaggcccctggacaagggtttgagtggctgggcaggttcaaccctgccaatggcggcacagatcttgcacagaagtttcagggtaggtcagtatgaccagaaacatgtccatcaccacagcgtatttggaactgagcaggctgacatctgacgacacggccacctattattgtctgaactctggttgacgaatgaatatcactatgaccacgtggggccagggaacgccggtcaccgtctcctcacgcctccacc

SEQ ID NO: 106 - DNA, 371 bp, Homo sapiens
caggtgcagctggtgcagtcgggggctgaagtgaagaagcctggggcctcagtgaaggtctcctgtcaggcttctggatacagattcaccgaccaacatttgaattggatacgacaggcccctggacaagggtttgagtggctgggcaggttcaaccctgccaatggcggcacagatcttgcacagaagtttcagggtagggtcagtatgaccagaaacatgtccatcaccacagcgtatttggaactgagcaggctgacatctgacgacacggccacctattattgtctgaattctggttgacgaatgaatatcactatgaccacgtggggccagggaaccgccggtcaccgtctcctcacgcctccacc

SEQ ID NO: 107 - DNA, 370 bp, Homo sapiens
caggtgcagctggtgcagtcgggggctgaagtgaagaagcctggggcctcagtgaaggtctcctgtcaggcttctggatacagattcaccgaccaacatttgaattggatacgacaggcccctggacaagggtttgagtggctgggcaggttcaaccctgccaatggcggcacagatcttgcacagaagtttcggggtagggtcagtatgaccagaaacatgtccatcaccacagcgtatttggaactgagcaggctgacatctgacgacacggccacctattattgtctgaattctggttggacgaatgaatatcactatgaccactggggccagggaacgccggtcaccgtctcctcacgcctccacc

SEQ ID NO: 108 - DNA, 366 bp, Homo sapiens; identical to SEQ ID NO: 98

SEQ ID NO: 109 - DNA, 367 bp, Homo sapiens
caggtgcagctggtgcagtctggggctgaagtgaagaagcctggggcctcagtgaaggtctcctgtcaggcttctggatacagattcaccgaccaacatttgaattggatacgacaggcccctggacaagggtttgagtggctgggcaggttcaaccctgccaatggcggcacagatcttgcacagaagtttcagggtagggtcagtatgaccagaaacatgtccatcaccacagcgtatttggaactgagcaggctgacatctgacgacacggccacctattattgtctgaattctggttgacgaatgaatatcactatgaccacgtggggccagggaacgccggtcaccgtctcctcacgcctcc

SEQ ID NO: 110 - DNA, 341 bp, Homo sapiens
caggtgcagctggtgcagtctggggctgaagtgaagaagcctggggcctcagtgaaggtctcctgtcaggcttctggatacagattcaccgaccaacatttgaattggatacgacaggcccctggacaagggtttgagtggctgggcaggttcaaccctgccaatggcggcacagatcttgcacagaagtttcagggtagggtcagtatgaccagaaacatgtccatcaccacagcgtatttggaactgagcaggctgacatctgacgacacggccacctattattgtctgaattctggttggacgaatgaatatcactatgaccactggggccagggaac

SEQ ID NO: 111 - DNA, 360 bp, Homo sapiens
caggtgcagctggtgcagtcgggggctgaagtgaagaagcctggggcctcagtgaaggtctcctgtcaggcttctggatacagattcaccgaccaacatttgaattggatacgacaggcccctggacaagggtttgagtggctgggcaggttcaaccctgccaatggcggcacagatcttgcacagaagtttcagggtagggtcagtatgaccagaaacatgtccatcaccacagcgtatttggaactgagcaggctgacatctgacgacacggccacctattattgtctgaattctggttggacgaatgaatatcactatgaccactggggccagggaacgccggtcaccgtctcctca

SEQ ID NO: 112 - DNA, 363 bp, Homo sapiens
caggtgcagctggtgcagtcgggggctgaagtgaagaagcctggggcctcagtgaaggtctcctgtcaggcttctggatacagattcaccgaccaacatttgaattggatacgacaggcccctggacaagggtttgagtggctgggcaggttcaaccctgccaatggcggcacagatcttgcacagaagtttcagggtagggtcagtatgaccagaaacatgtccatcaccacagcgtatttggaactgagcaggctgacatctgacgacacggccacctattattgtctgaattctggttggacgaatgaatatcactatgaccactggggccagggaaccgccggtcaccgtctcctcacg

SEQ ID NO: 113 - DNA, 348 bp, Homo sapiens
caggtgcagctggtgcagtcgggggctgaagtgaagaagcctggggcctcagtgaaggtctcctgtcaggcttctggatacagattcaccgaccaacatttgaattggatacgacaggcccctggacaagggtttgagtggctgggcaggttcaaccctgccaatggcggcacagatcttgcacagaagtttcagggtagggtcagtatgaccagaaacatgtccatcaccacagcgtatttggaactgagcaggctgacatctgacgacacggccacctattattgtctgaattctggttgacgaatgaatatcactatgaccacgtggggccagggaacgccggtc

SEQ ID NO: 114 - DNA, 361 bp, Homo sapiens
caggtgcagctggtgcagtcgggggctgaagtgaagaagcctggggcctcagtgaaggtctcctgtcaggcttctggatacagattcaccgaccaacatttgaattggatacgacaggcccctggacaagggtttgagtggctgggcaggttcaaccctgccaatggcggcacagatcttgcacagaagtttcagggtagggtcagtatgaccagaaacatgtccatcaccacagcgtatttggaactgagcaggctgacatctgacgacacggccacctattattgtctgaattctggttgacgaatgaatatcactatgaccacgtggggccagggaaccgccggtcaccgtctcctca

SEQ ID NO: 115 - DNA, 373 bp, Homo sapiens
caggtgcagctggtgcagtcgggggctgaagtgaagaagcctggggcctcagtgaaggtctcctgtcaggcttctggatacagattcaccgaccaacatttgaattggatacgacaggcccctggacaagggtttgagtggctgggcaggttcaaccctgccaatggcggcacagatcttgcacagaagtttcagggtagggtcagtatgaccagaaacatgtccatcaccacagcgtatttggaactgagcaggctgacatctgacgacacggccacctattattgtctgaattctggttggacgaatgaatatcactatgaccactggggccagggaacgccggtcaccgtctcctcacgcctccaccaac

SEQ ID NO: 116 - DNA, 406 bp, Homo sapiens
caggtgcagctggtgcagtcgggggctgaagtgaagaagcctggggcctcagtgaaggtctcctgtcaggcttctggatacagattcaccgaccaacatttgaattggatacgacaggcccctggacaagggtttgagtggctgggcaggttcaaccctgccaatggcggcacagatcttgcacagaagtttcagggtagggtcagtatgaccagaaacatgtccatcaccacagcgtatttggaactgagcaggctgacatctgacgacacggccacctattattgtctgaattctggttggacgaatgaatatcactatgaccactggggccagggaaccgccggtcaccgtctcctcacgcctccaccaacggcccatccggtccttcccccgtcggccaccc

SEQ ID NO: 117 - DNA, 368 bp, Homo sapiens
caggtgcagctggtgcagtcgggggctgaagtgaagaagcctggggcctcagtgaaggtctcctgtcaggcttctggatacagattcaccgaccaacatttgaattggatacgacaggcccctggacaagggtttgagtggctgggcaggttcaaccctgccaatggcggcacagatcttgcacagaagtttcagggtagggtcagtatgaccagaaacatgtccatcaccacagcgtatttggaactgagcaggctgacatctgacgacacggccacctattattgtctgaattctggttgacgaatgaatatcactatgaccacgtggggccagggaaccgccggtcaccgtctcctcacgcctcc

SEQ ID NO: 118 - DNA, 372 bp, Homo sapiens
caggtgcagctggtcagtcgggggctgaagtgaagaagcctggggcctcagtgaaggtctcctgtcaggcttctggatacagattcaccgaccaacatttgaattggatacgacaggccccctggacaagggtttgagtggctgggcaggttcaaccctgccaatggcggcacagatcttgcacagaagtttcagggtagggtcagtatgaccagaaacatgtccatcaccacagcgtatttggaactgagcaggctgacatctgacgacacggccacctattattgtctgaattctggttggacgaatgaatatcactatgaccactggggccagggaacgccggtcaccgtctcctcacgcctccaccaa

SEQ ID NO: 119 - DNA, 365 bp, Homo sapiens
caggtgcagctggtgcagtcgggggctgaagtgaagaagcctggggcctcagtgaaggtctcctgtcaggcttctggatacagattcaccgaccaacatttgaattggatacgacaggcccctggacaagggtttgagtggctgggcaggttcaaccctgccaatggcggcacagatcttgcacagaagtttcagggtagggtcagtatgaccagaaacatgtccatcaccacagcgtatttggaactgagcaggctgacatctgacgacacggccacctattattgtctgaactctggttgacgaatgaatatcactatgaccacgtggggccagggaaccgccggtcaccgtctcctcacgcc

SEQ ID NO: 120 - DNA, 358 bp, Homo sapiens
caggtgcagctggtgcagtcgggggctgaagtgaagaagcctggggcctcagtgaaggtctcctgtcaggcttctggatacagattcaccgaccaacatttgaattggatacgacaggcccctggacaagggtttgagtggctgggcaggttcaaccctgccaatggcggcacagatcttgcacagaagtttcagggtagggtcagtatgaccagaaacatgtccatcaccacagcgtatttggaactgagcaggctgacatctgacgacacggccacctattattgtctgaattctggttgacgaatgaatatcactatgaccacgtggggccagggaacgccggtcaccgtctcct

SEQ ID NO: 121 - DNA, 363 bp, Homo sapiens
caggtgcagctggtgcagtcgggggctgaagtgaagaagcctggggcctcagtgaaggtctcctgtcaggcttctggatacagattcaccgaccaacatttgaattggatacgacaggcccctggacaagggtttgagtggctgggcaggttcaaccctgccaatggcggcacagatcttgcacagaagtttcagggtagggtcagtatgaccggaaacatgtccatcaccacagcgtatttggaactgagcaggctgacatctgacgacacggccacctattattgtctgaattctggttgacgaatgaatatcactatgaccacgtggggccagggaaccgccggtcaccgtctcctcacg

SEQ ID NO: 122 - DNA, 408 bp, Homo sapiens
caggtgcagctggtgcagtcgggggctgaagtgaagaagcctggggcctcagtgaaggtctcctgtcaggcttctggatacagattcaccgaccaacatttgaattggatacgacaggcccctggacaagggtttgagtggctgggcaggttcaaccctgccaatggcggcacagatcttgcacagaagtttcagggtagggtcagtatgaccagaaacatgtccatcaccacagcgtatttggaactgagcaggctgacatctgacgacacggccacctattattgtctgaattctggttgacgaatgaatatcactatgaccacgtggggccagggaacgccggtcaccgtctcctcacgcctccaccaacgggcccacgtccggtccttcccccgtcggccaccc

SEQ ID NO: 123 - DNA, 349 bp, Homo sapiens
caggtgcagctggtgcagtcgggggctgaagtgaagaagcctggggcctcagtgaaggtctcctgtcaggcttctggatacagattcaccgaccaacatttgaattggatacgacaggcccctggacaagggtttgagtggctgggcaggttcaaccctgccaatggcggcacagatcttgcacagaagtttcagggtagggtcagtatgaccagaaacatgtccatcaccacagcgtatttggaactgagcaggctgacatctgacgacacggccacctattattgtctgaattctggttgacgaatgaatatcactatgaccacgtggggccagggaaccgccggtc

SEQ ID NO: 124 - DNA, 371 bp, Homo sapiens; identical to SEQ ID NO: 106

SEQ ID NO: 125 - DNA, 361 bp, Homo sapiens
caggtgcagctggtgcagtcgggggctgaagtgaagaagcctggggcctcagtgaaggtctcctgtcaggcttctggatacagattcaccgaccaacatttggattggatacgacaggcccctggacaagggtttgagtggctgggcaggttcaaccctgccaatggcggcacagatcttgcacagaagtttcagggtagggtcagtatgaccagaaacatgtccatcaccacagcgtatttggaactgagcaggctgacatctgacgacacggccacctattattgtctgaattctggttgacgaatgaatatcactatgaccacgtggggccagggaaccgccggtcaccgtctcctca

SEQ ID NO: 126 - DNA, 361 bp, Homo sapiens; identical to SEQ ID NO: 114

SEQ ID NO: 127 - DNA, 359 bp, Homo sapiens
caggtgcagctggtgcagtcgggggctgaagtgaagaagcctggggcctcagtgaaggtctcctgtcaggcttctggatacagattcaccgaccaacatttgaattggatacgacaggcccctggacaagggtttgagtggctgggcaggttcaaccctgccaatggcggcacagatcttgcacagaaagtttcagggtagggtcagtatgaccagaaacatgtccatcaccacagcgtatttggaactgagcaggctgacatctgacgacacggccacctattattgtctgaattctggttgacgaatgaatatcactatgaccactggggccagggaacgccggtcaccgtctcctc

SEQ ID NO: 128 - DNA, 370 bp, Homo sapiens
caggtgcagctggtgcagtcgggggctgaagtgaagaagcctggggcctcagtgaaggtctcctgtcaggcttctggatacagattcaccgaccaacatttgaattggatacgacaggcccctggacaagggtttgagtggctgggcaggttcaaccctgccaatggcggcacagatcttgcacagaagtttcagggtagggtcagtatgaccagaaacatgtccatcaccacagcgtatttggaactgagcaggctgacatctgacgacacggccacctattattgtctgaattctggttggacgaatgaatatcactatgaccactggggccagggaacgccggtcaccgtctcctcacgcctccacc

SEQ ID NO: 129 - DNA, 405 bp, Homo sapiens
caggtgcagctggtgcagtcgggggctgaagtgaagaagcctggggcctcagtgaaggtctcctgtcaggcttctggatacagattcaccgaccaacatttgaattggatacgacaggcccctggacaagggtttgagtggctgggcaggttcaaccctgccaatggcggcacagatcttgcacagaagtttcagggtagggtcagtatgaccagaaacatgtccatcaccacagcgtatttggaactgagcaggctgacatctgacgacacggccacctattattgtctgaattctggttggacgaatgaatatcactatgaccactggggccagggaacgccggtcaccgtctcctcacgcctccaccaacggcccatccggtccttcccccgtcggccaccc

SEQ ID NO: 130 - DNA, 361 bp, Homo sapiens
caggtgcagctggtgcagtcgggggctgaagtgaagaagcctggggcctcagtgaaggtctcctgtcaggcttctggatacagattcaccgaccaacatttgaattggatacgacaggcccctggacaagggtttgagtggctgggcaggttcaacccctgccaatggcggcacagatcttgcacagaagtttcagggtagggtcagtatgaccagaaacatgtccatcaccacagcgtatttggaactgagcaggctgacatctgacgacacggccacctattattgtctgaattctggttgacgaatgaatatcactatgaccactggggccagggaaccgccggtcaccgtctcctca

SEQ ID NO: 131 - DNA, 365 bp, Homo sapiens
caggtgcagctggtgcagtcgggggctgaagtgaagaagcctggggcctcagtgaaggtctcctgtcaggcttctggatacagattcaccgaccaacatttgaattggatacgacaggcccctggacaagggtttgagtggctgggcaggttcaaccctgccaatggcggcacagatcttgcacagaagtttcagggtagggtcagtatgaccagaaacatgtccatcaccacagcgtatttggaactgagcaggctgacatctgacgacacggccacctattattgtctgaattctggttgacgaatgaatatcactatgaccacgtggggccagggaaccgccggtcaccgtctcctcacgcc

SEQ ID NO: 132 - DNA, 371 bp, Homo sapiens
caggtgcagctggtgcagtctggggctgaagtgaagaagcctggggcctcagtgaaggtctcctgtcaggcttctggatacagattcaccgaccaacatttgaattggatacgacaggcccctggacaagggtttgagtggctgggcaggttcaaccctgccaatggcggcacagatcttgcacagaagtttcagggtagggtcagtatgaccagaaacatgtccatcaccacagcgtatttggaactgagcaggctgacatctgacgacacggccacctattattgtctgaattctggttgacgaatgaatatcactatgaccacgtggggccagggaaccgccggtcaccgtctcctcacgcctccacc

SEQ ID NO: 133 - DNA, 360 bp, Homo sapiens
caggtgcagctggtgcagtcgggggctgaagtgaagaagcctggggcctcagtgaaggtctcctgtcaggcttctggatacagattcaccgaccaacatttgaattggatacgacaggcccctggacaagggtttgagtggctgggcaggttcaaccctgccaatggcggcacagatcttgcacagaagtttcagggtagggtcagtatgaccagaaacatgtccatcaccacagcgtatttggaactgagcaggctgacatctgacgacacggccacctattattgtctgaattctggttgacgaatgaatatcactatgaccacgtggggccagggaacgccggtcaccgtctcctca

SEQ ID NO: 134 - DNA, 368 bp, Homo sapiens; identical to SEQ ID NO: 117

SEQ ID NO: 135 - DNA, 357 bp, Homo sapiens
caggtgcagctggtgcagtcgggggctgaagtgaagaagcctggggcctcagtgaaggtctcctgtcaggcttctggatacagattcaccgaccaacatttgaattggatacgacaggcccctggacaagggtttgagtggctgggcaggttcaaccctgccaatggcggcacagatcttgcacagaagtttcagggtagggtcagtatgaccagaaacatgtccatcaccacagcgtatttggaactgagcaggctgacatctgacgacacggccacctattattgtctgaattctggttgacgaatgaatatcactatgaccacgtggggccagggaaccgccggtcaccgtcct

SEQ ID NO: 136 - DNA, 423 bp, Homo sapiens
caggtgcagctggtgcagtctggggctgaagtgaagaagcctggggcctcagtgaaggtctcctgtcaggcttctggatacagattcaccgaccaacatttgaattggatacgacaggcccctggacaagggtttgagtggctgggcaggttcaaccctgccaatggcggcacagatcttgcacagaagtttcagggtagggtcagtatgaccagaaacatgtccatcaccacagcgtatttggaactgagcaggctgacatctgacgacacggccacctattattgtctgaattctggttgacgaatgaatatcactatgaccacgtggggccagggaacgccggtcaccgtctcctcacgcctccaccaacgggcccactccggtccttccccctcggccacccgtcctccaacgacgcca

SEQ ID NO: 137 - DNA, 446 bp, Homo sapiens
caggtgcagctggtgcagtcgggggctgaggtgaagaagcctggggcctcagtgaaagtctcctgtaaggctactggatatagattcaccgactaccatttgatctggatacgacaggcccctggacaagggtttgagtgggtgggcaggttcaaccctgccaatggcgtcacaaatcttgcgcagaagtttcaggatagggtcagtatgaccaggaacacgtccatcactacagcctatttggaactgagcaggctgacacctgacgacacggccacctattattgtgtgaattccggttgggatattgactatcactatgaccactggggccagggaacgctggtcatcgtctcctcagcctccaccaaggcccatcggtcttccccctggcaccctcctccaagagcacctctggggcacagcagccctggctgcctggtcaa

SEQ ID NO: 138 - DNA, 379 bp, Homo sapiens
caggtgcagctggtgcagtcgggggctgaggtgaagaagcctggggcctcagtgaaagtctcctgtaaggctactggatatagattcaccgactaccatttgatctggatacgacaggcccctggacaagggtttgagtgggtgggcaggttcaaccctgccaatggcgtcacaaatcttgcgcagaagtttcaggatagggtcagtatgaccaggaacacgtccatcactacagcctatttggaactgagcaggctgacacctgacgacacggccacctattattgtgtgaattccggttgggatattgactatcactatgaccactggggccagggaacgctggtcatcgtctcctcagcctccaccaacgggccca

SEQ ID NO: 139 - DNA, 450 bp, Homo sapiens
caggtgcagctggtgcagtctggggcagaggtgaagaagcctggggcctcagtgaaagcctcctgcgggacttctggatacaccttcgccaactactacatacattggctgcggcaggcccctggacaaggacttgagtggatggcctggatcaacccaggcagtggttccacgatctattcagagaattttgagggcagggtcaccgtaaccagtgacacatccatgcaaacggtctacatggacttggacagtctgacatctcgcgacacggccgtctattattgtgccagagatgcaactccaccaactacggaatttgaccactggggccaaggaacgctgatcaccgtgtcctcagcctccaccaagggcccatcggtcttccccctggcaccctcctccaagagcacctctggggcacagcggccctgggctgcctggtcaagg

SEQ ID NO: 140 - DNA, 424 bp, Homo sapiens
caggtgcagctggtgcagtctggggctgaggtgaagatgcttggggcctcagtgaaagtctcctgccaggcttctggccacaagttcaccaactactatatacattgggtgcgacaggcccctggacaagggcttgagtggatgggatggatcaaccctcagaatggtgacaataattttggaatgagatttcaggatagggtcaccacgaccagtgacaggtccaccaggacagtgtatttggagttgagtggcctgacacctgacgacacggccatgtatttttgcacgagatttctgaaacctgtggaatattacgatagaagtggtccccaatttgggtattggggccagggaaccctggtctccgtctcctcagcctccaccaggcccatcggtcttccccctggccaccctcctccaa

SEQ ID NO: 141 - DNA, 371 bp, Homo sapiens
caggtgcagctggtgcagtcgggggctgaggtgaagaagcctggggcctcagtgaaagtctcctgtaaggctactggatatagattcaccgactaccatttgatctggatacgacaggcccctggacaagggtttgagtgggtgggcaggttcaaccctgccaatggcgtcacaaatcttgcgcagaagtttcaggatagggtcagtatgaccaggaacacgtccatcactacagcctatttggaactgagcaggctgacacctgacgacacggccacctattattgtgtgaattccggttgggatattgactatcactatgaccactggggccagggaacgctggtcatcgtctcctcagcctccaccaa

SEQ ID NO: 142 - DNA, 403 bp, Homo sapiens
caggtgcagctggtgcagtctggggcagaggtgaagaagcctggggcctcagtgaaagtctcctgcgggacttctggatacaccttcgccaactactacatacattggctgcggcaggcccctggacaaggacttgagtggatggcctggatcaacccaggcagtggttccacgatctattcagagaattttgagggcagggtcaccgtaaccagtgacacatccatgcaaacggtctacatggacttggacagtctgacatctcgcgacacggccgtctattattgtgccagagatgcaactccaccaactacggaatttgaccactggggccaaggaacgctgatcaccgtgtcctcagcctccaccaacggcccatccggtccttccccctcggccaccc

SEQ ID NO: 143 - DNA, 369 bp, Homo sapiens
caggtgcagctggtgcagtctggggcagaggtgaagaagcctggggcctcagtgaaagtctcctgcgggacttctggatacaccttcgccaactactacatacattggctgcggcaggcccctggacaaggacttgagtggatggcctggatcaacccaggcagtggttccacgatctattcagagaattttgagggcagggtcaccgtaaccagtgacacatccatgcaaacggtctacatggacttggacagtctgacatctcgcgacacggccgtctattattgtgccagagatgcaactccaccaactacggaatttgaccactggggccaaggaacgctgatcaccgtgtcctcagcctccacc

SEQ ID NO: 144 - DNA, 361 bp, Homo sapiens
caggtgcagctggtgcagtctggggcagaggtgaagaagcctggggcctcagtgaaagtctcctgcgggacttctggatacaccttcgccaactactacatacattggctgcggcaggcccctggacaaggacttgagtggatggcctggatcaacccaggcagtggttccacgatctattcagagaattttgagggcagggtcaccgtaaccagtgacacatccatgcaaacggtctacatggacttggacagtctgacatctcgcgacacggccgtctattattgtgccagagatgcaactccaccaactacggaatttgaccactggggccaaggaacgctgatcaaccgtgtcctca

SEQ ID NO: 145 - DNA, 389 bp, Homo sapiens
caggtgcagctggtgcagtctggggcagaggtgaagaagcctggggcctcagtgaaagtctcctgccaggcttctggccacaagttcaccaactactatatacattgggtgcgacaggcccctggacaagggcttgagtggatgggatggatcaaccctcagaatggtgacaataattttggaatgagatttcaggatagggtcaccacgaccagtgacaggtccaccaggacagtgtatttggagttgagtggcctgacacctgacgacacggccatgtatttttgcacgagatttctgaaacctgtggaatattacgatagaagtggtccccaatttgggtattggggccagggaaccctggtctccgtctcctcagcctccaccaa

SEQ ID NO: 146 - DNA, 360 bp, Homo sapiens
caggtgcagctggtgcagtctggggcagaggtgaagaagcctggggcctcagtgaaagtctcctgcgggacttctggatacaccttcgccaactactacatacattggctgcggcaggcccctggacaaggacttgagtggatggcctggatcaacccaggcagtggttccacgatctattcagagaattttgagggcagggtcaccgtaaccagtgacacatccatgcaaacggtctacatggacttggacagtctgacatctcgcgacacggccgtctattattgtgccagagatgcaactccaccaactacggaatttgaccactggggccaaggaacgctgatcaccgtgtcctca

SEQ ID NO: 147 - DNA, 377 bp, Homo sapiens
caggtgcagctggtgcagtctggggctcaggtgctgaagcctggggcctcagtgaagctctcctgcaagacttctgggtacaccttcagcgacttctatacccactgggtgcgacaggtccctggccgacgtcttgagtggatgggttggttcaatcctaatagtggtggcgcccactatggactggactttcagggcagagtcacatcggcgggggacacgtcaatcaccacggtctacatggaactgaccaggctggcttttgacgacacggccatctattactgtgcgagagaggcacattgtgggactaccagctgccaatttgactcctggggccagggaacgctggtcaccgtctcctcggcctccaccaa

SEQ ID NO: 148 - DNA, 346 bp, Homo sapiens
caggtgcagctggtgcagtttggggctgacgtggagaagcctggggcctcagtgagagtctcgtgtaaggcctctggatatgacttcattaactattatatacattaggtgcggcaggcccctggacaagggcttgagtggatggcctggatcaaccctagcggtggtgccacaatctatgcggagagttttgagggcagggtcaccgtaaccagggacacgtccatgagcaccgtctacatggaattggagagcctgacatctggcgacacggccatgtattactgcgccagagatgcgactccgataactacggaatttgtctactggggccagggaacactga

SEQ ID NO: 149 - DNA, 366 bp, Homo sapiens
caggtgcagctggtgcagtctggggctgaggtgaagaagccggggtcctcagtgaaggtctcctgcaaggcttctgggggcaccttcagtagctctgctgttaactgggtgcgacaggcccctggaaaacgtcttgagtgggtggggtggttcaatcctaagactggtggcgcgcactatggactggactatcagggcagagtgacgatgaccggggacacgtccatcaccacagtctacatggagttgaccagattggcatccgacgacacggccatgtattattgtgcgagagagggagtttgtagaactaccagctgccaatttgacttctggggccagggaacgctggtcaccgtcttctca

SEQ ID NO: 150 - DNA, 352 bp, Homo sapiens
caggtgcagctggtgcagtttggggctgacgtggagaagcctggggcctcagtgagagtctcgtgtaaggcctctggatatgacttcattaactattatatacattgggtgcgacaggcccctggacaaggacttgagtggatgggatgtatcaatcctaggactggtgacacaaagtatgcacagaggtttcaggacgaggtctccatgaccagggacacgtccatcagtacagtctacatggagctgagagaaatgacctatgacgacacggccatctatttttgtctcactgcaatagacggtgtctcgtactggggcctgggaaagctggtcaccgtcgcctcagcct

SEQ ID NO: 151 - DNA, 347 bp, Homo sapiens
caggtgcagctggtgcagtttggggctgacgtggagaagcctggggcctcagtgagagtctcgtgtaaggcctctggatatgacttcattaactattatatacattgggtgcgacaggcccctggacaaggacttgagtggatgggatgtatcaatcctaggactggtgacacaaagtatgcacagaggtttcaggacaaggtctccatgaccagggacacgtccatcagtacagtctacatggagctgagagaaatgacctatgacgacacggccatctattttgtctcactgcaatagacggtgtctcccgtatggggcctgggaaagctggtcaccgtcgcctc

SEQ ID NO: 152 - DNA, 360 bp, Homo sapiens
caggtgcagctggtgcagtctggggctgaggtgaagaagcctggggcctcagtgaaagtctcctgcgggacttctggatacaccttcgccaactactacatacattggctgcggcaggcccctggacaaggacttgagtggatggcctggatcaacccaggcagtggttccacgatctattcagagaattttgagggcagggtcaccgtaaccagtgacacatccatgcaaacggtctacatggacttggacagtctgacatctcgcgacacggccgtctattattgtgccagagatgcaactccaccaactacggaatttgaccactggggccaaggaacgctgatcaccgtgtcctca

SEQ ID NO: 153 - DNA, 368 bp, Homo sapiens
caggtgcagctggtgcaatctggggctgaaatgatgaagcctggggcctcactgaaggtctcctgtcagacttcaggatataacttcaatggccattttctacactgggtgcgacaggcccctggacaagggcttgagtggatggcaaggatcaaccctagtagtggtgtcacagattttgcccagaagtttcaggacagagtcaccgtgaccagggacagtctccgacaactacaatctacaataggaattacataggctgcgatctgatgacacggccgtgtattactgtgcgagagatgggatcatttcgacttggtctttttgacgtggggccagggaacgcgtggtcaccgtctcctctcgcc

SEQ ID NO: 154 - DNA, 359 bp, Homo sapiens
caggtgcagctggtgcagtttggggctgacgtggagaagcctggggcctcagtgagagtctcgtgtaaggcctctggatatgacttcattaactattatatacattgggtgcgacaggcccctggacaaggacttgagtggatgggatgtatcaatcctaggactggtgacacaaagtatgcacagaggtttcaggacaaggtctccatgaccagggacacgtccatcagtacagtctacatggagctgagagaaatgacctatgacgacacggccatctatttttgtctcactgcaatagacggtgtctcgtactggggcctgggaaagctggtcaccgtcgcctcagcctccaccaa

SEQ ID NO: 155 - DNA, 360 bp, Homo sapiens
caggtgcagctggtgcagtctgatgctgacctgaggaaccccggggcctcagtgaaggtctcctgtaaggcctctggatatatattcaaaaatcaatatatacactgggtgcgacaggcccctggacaagggtttgagtggatgggacatctcaacccttggagcgggggcacagtttatgcacagaagttccaggacaggctttccatgaccagggacatgtccacaagtacagcctatatggagctgagcagactgagatttgacgacacggccgtatattactgtgcgagagacccccaagaggtcagtggctggtacacgcactggggccagggaacgctggtcaccgtctcctca

SEQ ID NO: 156 - DNA, 357 bp, Homo sapiens
caggtgcagctggtgcaatctggggctgaaatgatgaagcctggggcctcactgaaggtctcctgtcagacttcaggatataacttcaatggccattttctacactgggtgcgacaggcccctggacaagggcttgagtggatggcaaggatcaaccctagtagtggtgtcacagattttgcccagaagtttcaggacagagtcaccgtgaccagggacatctccacaactacaatctacatggaattacataggctgcgatctgatgacacggccgtgtattactgtgcgagagatgggatcatttcgactggtctttttgactggggccagggaaccctggtcaccgtctcctca

SEQ ID NO: 157 - DNA, 414 bp, Homo sapiens
caggtgcagctggtgcaatctggggctggggtgaggaagcctgggtcctcggtgatggtctcctgcaaggcttctggagacaccttcaacaactactatatacattgggtgcggcaggcccctggacatgggacttagaagtggatggcctggatcaaccctagcggtggtgccacaatctatgcagaggcttttgagggcagggtcaccgtaaccacggacacgtccatgaaaacagtctacatggagttggagagcctgacatctggcgacacggccatgtatttctgcgccagagatgcgactccgataactacggaatttgactactggggccagggaacactgatcaccgtctcctcagcctccaccaacggcccactcggtccttccccctcggccaccctcctccaa

SEQ ID NO: 158 - DNA, 352 bp, Homo sapiens
caggtgcagctggtgcagtttggggctgacgtggagaagcctggggcctcagtgagagtctcgtgtaaggcctctggatatgacttcattaactattatatacattgggtgcgacaggcccctggacaaggacttgagtggatgggatgtatcaatcctaggactggtgacacaaagtatgcacagaggtttcaggacaaggtctccatgaccagggacacgtccatcagtacagtctacatggagctgagagaaatgacctatgacgacacggccatctatttttgtctcactgcaatagacggtgtctcgtactggggcctgggaaagctggtcaccgtcgcctcagcct

SEQ ID NO: 159 - DNA, 521 bp, Homo sapiens
caggtgcagctggtgcagtctggggctgaggtgaagaagcctggggcctcaatgaaggtctcatgtcagacttcaggatacacgtttaactcctattatatacactggatgcgccaggtccctggacaaggccttgagtggatgggatggattaaccctaatagtggttacacaaactatacacagaaatttcagggaagggtcaccatgaccagggatacgtccattaacacagcctacctggagctcagtgccctgagatccgacgagacggccgtttattattgtgcgagagactttagcgacggttggccttactccttcgacttctggggccagggaactctagtcaccgtctcctcagcctccaccaagggcccatcggtcttcccctggcaccctcctccaagagcacctctgggggcacagcggccctgggctgcctggtcaaggactacttcccgaaccggtgacggtgtcgtggaactcaggcgccctgaccagcggcgtgcacaccttcc

SEQ ID NO: 160 - DNA, 366 bp, Homo sapiens
caggtgcagctggtgcagtctggggctgaaatgatgaagcctggggcctcactgaaggtctcctgtcagacttcaggatataacttcaatggccattttctacactgggtgcgacaggcccctggacaagggcttgagtggatggcaaggatcaaccctagtagtggtgtcacagattttgcccagaagtttcaggacagagtcaccgtgaccagggacatctccacaactacaatctacatggaattacataggctgcgatctgatgacacggccgtgtattactgtgcgagagatgggatcatttcgactggtctttttgactggggccagggaacgctggtcaccgtctcctctgcctccacc

SEQ ID NO: 161 - DNA, 395 bp, Homo sapiens
caggtgcagctggtgcaatctgggtctcaaatgaagaagtctggggcctcactgaatgtctcctgtcagacttctggatacacattcagcgactactatcttcactgggtgcgacgggcccctggacaaggccttcagtggatgggatggatcaatcctgagaatggtgacacaaattatgcccagacatttaagggcagggtcaccatgaccagggacacagccattaatacagcctacatggtgttgaccggtctaaaatttaacgacacggccatgtattattgtgcgagagattggcagttccatgtcatttttgacgactattacatagacgtctggggcacaggaaccacggtcatcgtctcctcagcctccaccaagggcccatcggt

SEQ ID NO: 162 - DNA, 366 bp, Homo sapiens
caggtgcagctggtgcagtctggggctcaggtgctgaagcctggggcctcagtgaagctctcctgcaagacttctgggtacaccttcagcgacttctatatccactgggtgcgacaggtccctggccgacgtcttgagtggatgggttggttcaatcctaatagtggtggcgcccactatggactggactttcagggcagagtcacatcggcgggggacacgtcaatcaccacggtctacatggaactgaccaggctggcttttgacgacacggccatctattactgtgcgagagaggcacattgtgggactaccagctgccaatttgactcctggggccagggaacgctggtcaccgtctcctca

SEQ ID NO: 163 - DNA, 369 bp, Homo sapiens
caggtgcagctggtgcagtctggggctcaggtgctgaagcctggggcctcagtgaagctctcctgcaagacttctgggtacaccttcagcgacttctatatccactgggtgcgacaggtccctggccgacgtcttgagtggatgggttggttcaatcctaatagtggtggcgcccactatggactggactttcagggcagagtcacatcggcgggggacacgtcaatcaccacggtctacatggaactgaccaggctggcttttgacgacacggccatctattactgtgcgagagaggcacattgtgggactaccagctgccaatttgactcctggggccagggaacgcgtggtcaccgtctcctcacg

SEQ ID NO: 164 - DNA, 388 bp, Homo sapiens
caggtgcagctggtgcaatctggggctgaagtgaggaagcctggggcctcagtgaaggtctcctgcgtggcgtctggatacaccctcagcgaccactttttacactgggtgcgtcgggcccctggacatggccttgagtggcttggatggactaaccctcagaatggtttcacaaattttgcacaagactttcaggacagggtcaccatgaccagtgacacgtccaccggcacagcctatatggagttaaataggctgacatctgccgacacggccatatattactgtgcgagaggagcccaccgtcactctgataggagtggttattactctgaaattgacgcctggggccagggaaccctggtcaccgtctcctcacgcctccacc

SEQ ID NO: 165 - DNA, 415 bp, Homo sapiens
caggtgcagctggtgcagcctggggctgaggtgaagaagcctgcgtcctcagtgaaggtctcctgccaggcttccagatacaccttcaccaaatactttacacagtgggtgcgacagggccctggacaagggcatgagtggttgggatgcatcaacccttacaatgataacacacactacgcacagaagttctggggcagagtcaccattaccagtgacaggtctgtgagcacagcctacatggagctgagcagcctgagatctgaagacatggtcgtgtattcctgtgtgccctgggggaatccaaccggagattactactactactactacatggacgtctggggcaaagggaccacggtcaccgtctcctcaggatgcatccgcccaaccctttcccctcgtctcctctgac

SEQ ID NO: 166 - DNA, 408 bp, Homo sapiens
caggtgcagctggtgcagtctggggctaaaatagggaaacctggggcctcagtgcaagtctcctgcaaggcctctgaatataccttcaccgacttctatatacactgggtgcgacagacccctggacaagggcttgagtggatgggatggatcaacgctaacactggcgccacagagtttgcacagaagtttctgggcagaatcatcatgaccagggacacttccatcaacacggtctacatggaactgagtagactgatatttaacgacacggccatttattattgtgcgagtgcctatgcgagtagtggtgagtttctttattggggccagggatcccgcgtcaccgtctcctcagggagtgcatccgccccaacccttttcccctcgtctcctctgagaattccc

SEQ ID NO: 167 - DNA, 354 bp, Homo sapiens
caggtgcagctggtgcagtctggggcagaggtgaagaagcctggggcctcagtgaaggtctcctgcgggacttctggatacaccttcgccaattactatatacattggctgcggcaggcccctggacaaggacttgagtggatggcctggatcaaccctagcggtggctccacaatctattcagagaattttgagggcagggtcaccgtaaccagggacacgtccatgaaaacggtctacatggaattggacagtctcacatctggcgacacggccgtgtattattgtgccagagatgcgactccggtaactacggaatttgactactggggccagggaacgctgatcaccgtc

SEQ ID NO: 168 - DNA, 408 bp, Homo sapiens
caggtgcagctggtgcagtctggggctgaaatagggaaacctggggcctcagtgcaagtctcctgcaaggcctctgaatataccttcaccgacttctatatacactgggtgcgacagacccctggacaagggcttgagtggatgggatggatcaacgctaacactggcgccacagagtttgcacagaagtttctgggcagaatcatcatgaccagggacacttccatcaacacggtctacatggaactgagtagactgatatttaacgacacggccatttattattgtgcgagtgcctatgcgagtagtggtgagtttctttattggggccagggatcccgcgtcaccgtctcctcagggagtgcatccgccccaacccttttcccctcgtctcctctgagaattccc

SEQ ID NO: 169 - DNA, 369 bp, Homo sapiens
caggtgcagctggtgcagtctggggcagaggtgaagaagcctggggcctcagtgaaggtctcctgcgggacttctggatacaccttcgccaattactatatacattggctgcggcaggcccctggacaaggacttgagtggatggcctggatcaaccctagcggtggctccacaatctattcagagaattttgagggcagggtcaccgtaaccagggacacgtccatgaaaacggtctacatggaattggacagtctcacatctggcgacacggccgtgtattattgtgccagagatgcgactccggtaactacggaatttgactactggggccagggaacgctgatcaccgtctcctcagcctccacc

SEQ ID NO: 170 - DNA, 367 bp, Homo sapiens
caggtgcagctggtgcagtctggggcagaggtgaagaagcctggggcctcagtgaaggtctcctgcgggacttctggatacaccttcgccaattactatatacattggctgcggcaggcccctggacaaggacttgagtggatggcctggatcaaccctagcggtggctccacaatctattcagagaattttgagggcagggtcaccgtaaccagggacacgtccatgaaaacggtctacatggaattggacagtctcacatctggcgacacggccgtgtattattgtgccagagatgcgactccggtaactacggaatttgactactggggccagggaacgctgatcaccgtctcctcacgcctcc

SEQ ID NO: 171 - DNA, 362 bp, Homo sapiens
caggtgcagctggtgcagtctggggcagaggtgaagaagcctggggcctcagtgaaggtctcctgcgggacttctggatacaccttcgccaattactatatacattggctgcggcaggcccctggacaaggacttgagtggatggcctggatcaaccctagcggtggctccacaatctattcagagaattttgagggcagggtcaccgtaaccagggacacgtccatgaaaacggtctacatggaattggacagtctcacatctggcgacacggccgtgtattattgtgccagagatgcgactccggtaactacggaatttgactactggggccagggaacgctgatcaccgtctcctcacg

SEQ ID NO: 172 - DNA, 360 bp, Homo sapiens
caggtgcagctggtgcagtctggggcagaggtgaagaagcctggggcctcagtgaaggtctcctgcgggacttctggatacaccttcgccaactactatatacattgggtgcgtcaggcccctggacatgggcttgagtggatggcctggatcaaccctagcggtggttccacaatctatgcagagagttttgagggcagggtcaccgtaaccgcggacacgtccatgaagacagtctacatggaattggagagcctgacatctggcgacacggccatgtatttctgcgccagagatgcgactccgatgactacggaatttgactactggggccagggaacactgatcaccgtctcctca

SEQ ID NO: 173 - DNA, 399 bp, Homo sapiens
caggtgcagctggtgcagtctggggctgaagtaaagaaacctggggcctcggtgaaggtctcctgcaaggcttctggatacacgttcaccgactactttgtacactgggtgcgacaggcccctggacaaaattttgagtggatgggatggaccaacgtcaacactggtggcacaaagtatgccccaaagtttcagggcagggtcacgattaccgctgacatacccacgaacacagcctacttggagttgagcagcctgagatctgacgatgcggccgtctactactgtgcgaggggatccatcctagacatgtctacagcgtcttcctattattacgttatggacgtctggggccaagggaccacagtcaccgtctcctcagcttccaccaagggccca

SEQ ID NO: 174 - DNA, 360 bp, Homo sapiens
caggtgcagctggtgcagtctggggcagaggtgaagaagcctggggcctcagtgaaggtctcctgcgggacttctggatacaccttcgccaattactatatacattggctgcggcaggcccctggacaaggacttgagtggatggcctggatcaaccctagcggtggctccacaatctattcagagaattttgagggcagggtcaccgtaaccagggacacgtccatgaaaacggtctacatggaattggacagtctcacatctggcgacacggccgtgtattattgtgccagagatgcgactccggtaactacggaatttgactactggggccagggaacgctgatcaccgtctcctca

SEQ ID NO: 175 - DNA, 373 bp, Homo sapiens
caggtgcagctggtgcagtctggggctgaggtgaagaagcctgggacatcagtaaaagtctcctgcaaggcctttggatacgccttcagcgactattatctacactgggtgcgacaggtcccaggacaaggccttgagtggatgggctggatggacccaaacaatggtgccacaaactatgcacccaagtttcagggcatgatcattatgaccagagacacgtcccatcaatacagtttatttggagttgaggaggctgagatccgacgacacggccgtctatttttgtacgggagatgccggcgggccccagacgtattactatgacagtagtggtttgaatttgactcctggggccagggaacgctggtca

SEQ ID NO: 176 - DNA, 372 bp, Homo sapiens
caggtgcagctggtgcaatctgggtctgaagtgaagaagtctggggcctcagtgagcgtctcctgcaaggcctctggatacagcttcaccgactactatcttcactgggtgcgacaggcccctggacagggccttcagtggatgggatggatcaatcctgagagtggtgacacaaactatgcgcgggcctttcggggcaggatcaccatgaccagggacacgtccattaatactgcctatatgatgttgaccggcctaaggtctaacgacacggccgtctatttctgtgcgagagactggcagttccacgtcatctttgacgactactacatagacgcctggggcaaagggaccacagtcatcgtctcctca

SEQ ID NO: 177 - DNA, 366 bp, Homo sapiens
caggtgcagctggtgcagtctgggactgacgcgcggaagcctggggcctcagtgaaggtctcctgcaaggcttctggatacagcttcaccgactattatatacactgggtgcgacaggcccctggaaaacgtcttgagtgggtggggtggttcaatcctaagactggtggcgcgcactatggactggactatcagggcagagtgacgatgaccggggacacgtccatcaccacagtctacatggagttgaccagattggcatccgacgacacggccatgtattattgtgcgagagagggagtttgtagaactaccagctgccaatttgacttctggggccaagggacactggtcaccgtctcttca

SEQ ID NO: 178 - DNA, 365 bp, Homo sapiens
caggtgcagctggtgcagtctggggctgaggtgaagaagcctggggcctcaatgagggtctcatgtcagacttcaggatacacgtttaactcctattatatacactggatgcgccaggtccctggacaaggccttgagtggatggggtggattaaccctaatagtggttacacaaactatacacagaaatttcagggaagggtcaccatgaccagggatacgtccattaacacagcctatctggagctcagtgccctgagatctgacgagacggccgtttattattgtgcgagagactttagcgacggttggccttactccttcgacttctggggccagggaactctagtccaccgtctcctcag

SEQ ID NO: 179 - DNA, 421 bp, Homo sapiens
caggtgcagctggtgcagtctggggcagaggtgaagaagcctggggcctcagtgaaggtctcctgcgggacttctggatacaccttcaccaactactatatacattgggtgcggcaggcccctggacatgggcttgagtggatggcctggatcaaccctagcggtggagccacaatctatgcagaggcttttgagggcagagtcaccgtaaccacggacacgtccatgaaaacagtctacatggagttggagagcctgacatctggcgacacggccatgtatttctgcgccagagatgcgactccgataactacggaatttgactactggggccagggaacactgatcaccgtctcctcagggagtgcatccgccccaacccttttccccctcgtcctcctctgacgaacttcccatacgt

SEQ ID NO: 180 - DNA, 424 bp, Homo sapiens
caggtgcagctggtgccgtctggggctgaggtgaagaagcctggggcctcaatgagggtctcatgtcagacttcaggatacacgtttaactcctattatatacactggatgcgccaggtccctggacaaggccttgagtggatggggtggattaaccctaatagtggttacacaaactatacacagaaatttcaggacagggtcaccatgaccagggatacgtccattaacacagcctacctggagctcagtgccctgagatctgacgagacggccgtttattattgtgcgagagactttagcgacggttggccttactccttcgacttctggggccagggaactctagtcaccgtctcctcacgcctccaccaacgggcccatcggtccttccccctggccaccctcctccaacgacgccacc

SEQ ID NO: 181 - DNA, 367 bp, Homo sapiens
caggtgcagctggtgcagtctgggactgacgcgcggaagcctggggcctcagtgaaggtctcctgcaaggcttctggatacagcttcaccgactattatatacactgggtgcgacaggcccctggaaaacgtcttgagtgggtggggtggttcaatcctaagactggtggcgcgcactatggactggactatcagggcagagtgacgatgaccggggacacgtccatcaccacagtctacatggagttgaccagattggcatccgacgacacggccatgtattattgtgcgagagagggagtttgtagaactaccagctgccaatttgacttctggggccagggaacgctggtcaccgtcttctcag

SEQ ID NO: 182 - DNA, 354 bp, Homo sapiens
caggtgcagctggtgcagtctgggactgacgcgcggaagcctggggcctcagtgaaggtctcctgcaaggcttctggatacagcttcaccgactattatatacactgggtgcgacaggcccctggaaaacgtcttgagtgggtggggtggttcaatcctaagactggtggcgcgcactatggactggactatcagggcagagtgacgatgaccggggacacgtccatcaccacagtctacatggagttgaccagattggcatccgacgacacggccatgtattattgtgcgagagagggagtttgagaactaccagctgccaatttgacttcgtggggccagggaacgcgtggt

SEQ ID NO: 183 - DNA, 407 bp, Homo sapiens
caggtgcagctggtgcagtctggggcagaggtgaagaagcctggggcctcagtgaaggtctcctgcgggacttctggatacaccttcaccaactactatatacattgggtgcggcaggcccctggacatgggcttgagtggatggcctggatcaaccctagcggtggagccacaatctatgcagaggcttttgagggcagagtcaccgtaaccacggacacgtccatgaaaacagtctacatggagttggagagcctgacatctggcgacacggccatgtatttctgcgccagagatgcgactccgataactacggaatttgactactggggccagggaacactgatcaccgtctcctcagcctccaccaaggcccatcggtcttccccctggccaccctcctccaa

SEQ ID NO: 184 - DNA, 365 bp, Homo sapiens
caggtgcagctggtgcagtctggggcagaggtgaagaagcctggggcctcagtgaaggtctcctgcgggacttctggatacaccttcaccaactactatatacattgggtgcggcaggcccctggacatgggcttgagtggatggcctggatcaaccctagcggtggtgccacaatctatgcagaggcttttgagggcagggtcaccgtaaccacggacacgtccatgaaaacagtctacatggagttggagagcctgacatctggcgacacggccatgtatttctgcgccagagatgcgactccgataactacggaatttgactactggggccagggaacactgatcaccgtctcctcacgcct

SEQ ID NO: 185 - DNA, 374 bp, Homo sapiens
caggtgcagctggtgcagtctggggcagaggtgaagaagcctggggcctcagtgaaggtctcctgcgggacttctggatacaccttcaccaactactatatacattgggtgcggcaggcccctggacatgggcttgagtggatggcctggatcaaccctagcggtggtgccacaatctatgcagaggcttttgagggcagggtcaccgtaaccacggacacgtccatgaaaacagtctacatggagttggagagcctgacatctggcgacacggccacatatttctgcgccagagatgcgactccgataactacggaatttgactactggggccagggaacactgatcaccgtctcctcagcctccaccaacgg

SEQ ID NO: 186 - DNA, 421 bp, Homo sapiens
caggtgcagctggtgcagtctgggactgacgcgcggaagcctggggcctcagtgaaggtctcctgcaaggcttctggatacagcttcaccgactattatatacactgggtgcgacaggcccctggaaaacgtcttgagtgggtgggatggttcaatcctaagactggtggcgcgcactatggactggactatcagggcagagtgacgatgaccggggacacgtccatcaccacagtctacatggagttgaccagattggcatccgacgacacggccatgtattattgtgcgagagagggagtttgtagaactaccagctgccaatttgacttctggggccagggaacgctggtcaccgtcttctcagcctccaccaacgggcccatccggtcttccccctggccaccctcctccaacgacg

SEQ ID NO: 187 - DNA, 367 bp, Homo sapiens
caggtgcagctggtgcagtctggggctgaggtgaagaagcctgggacatcagtaaaagtctcctgcaaggcctttggatacgccttcagcgactattatctacactgggtgcgacaggtcccaggacaaggccttgagtggatgggctggatggacccaaacaatggtgccacaaactatgcacccaagtttcagggcatgatcattatgaccagagacacgtccatcaatacagtttatatggagttgaggaggctgagatccgacgacacggccgtctatttttgtacgagagatgccggcgggccccagacgtattactatgacagtagtggtttgaatttgactccgtggggccagggaacgc

SEQ ID NO: 188 - DNA, 402 bp, Homo sapiens
caggtgcagctggtgcagtctggggcagaggtgaggaagcctggggcctcagtgaaggtctcctgcgggacttctggatacaccttcgccaactactatatacattgggtgcggcaggcccctggacatgggcttgagtggatggcctggatcaaccctagcggtggtgccacaatctatgcagaggcttttgagggcagggtcaccgtaaccacggacacgtccatgaaaacagtctacatggagttggagagcctgacatctggcgacacggccatgtatttctgcgccagagatgcgactccgataactacggaatttgactactggggccagggaacactgatcaccgtctcctcacgcctccaccaacgggcccactccggtccttccccctcggcc

SEQ ID NO: 189 - DNA, 366 bp, Homo sapiens
caggtgcagctggtgcagtctgggactgacgcgcggaagcctggggcctcagtgaaggtctcctgcaaggcttctggatacagcttcaccgactattatatacactgggtgcgacaggcccctggaaaacgtcttgagtggtggggtggttcaatcctaagactggtggcgcgcactatggactggactatcagggcagagtgacgatgaccgggggacacgtccatcaccacagtctacatggagttgaccagattggcatccgacgacacggccatgtattattgtgcgagagagggagtttgtagaactaccagctgccaatttgacttctggggccagggaacgctggtcaccgtcttctca

SEQ ID NO: 190 - DNA, 384 bp, Homo sapiens
caggtgcagctggtgcagtctggggctgaggtgaagaagcctgggacatcagtaaaagtctcctgcaaggcctttggatacgccttcagcgactattatctacactgggtgcgacaggtcccaggacaaggccttgagtggatgggctggatggacccaaacaatggtgccacaaactatgcacccaagtttcagggcatgatcattatgaccagagacacgtccatcaatacagtttatttggagttgaggaggctgagatccgacgacacggccgtctatttttgtacgagagatgccggcgggccccagacgtattactatgacagtagtggttttgaatttgactcctggggccagggaacgctggtcattgtctcctca

SEQ ID NO: 191 - DNA, 370 bp, Homo sapiens
caggtgcagctggtgcagtctggggcagaggtgaagaagcctggggcctcagtgaaggtctcctgcgggacttctggatacaccttcgccaattactatatacattggctgcggcaggcccctggacaaggacttgagtggatggcctggatcaaccctagcggtggctccacaatctattcagagaattttgagggcagggtcaccgtaaccagggacacgtccatgaaaacggcctacatggaattggacagtctcacatctggcgacacggccgtgtattattgtgccagagatgcgactccggtaactacggaatttgactactggggccagggaacgctgatcaccgtctcctcacgcctccacc

SEQ ID NO: 192 - DNA, 411 bp, Homo sapiens
caggtgcagctggtgcagtctggggcagaggtgaagaagcctggggcctcagtgaaggtctcctgcgggacttctggatacaccttcaccaactactatatacattgggtgcggcaggcccctggacatgggcttgagtggatggcctggatcaaccctagcggtggagccacaatctatgcagaggcttttgagggcagagtcaccgtaaccacggacacgtccatgaaaacagtctacatggagttggagagcctgacatctggcgacacggccatgtatttctgcgccagagatgcgactccgataactacggaatttgactactggggccagggaacactgatcaccgtctcctcagggagtgcatccgccccaacccttttcccctcgtctcctctgagaattccc

SEQ ID NO: 193 - DNA, 360 bp, Homo sapiens
caggtgcagctggtgcagtctggggcagaggtgaagaagcctggggcctcagtgaaggtctcctgcgggacttctggatacaccttcaccaactactatatacattgggtgcggcaggcccctggacatgggcttgagtggatggcctggatcaaccctagcggtggagccacaatctatgcagaggcttttgagggcagagtcaccgtaaccacggacacgtccatgaaaacagtctacatggagttggagagcctgacatctggcgacacggccatgtatttctgcgccagagatgcgactccgataactacggaatttgactactggggccagggaacactgatcaccgtctcctca

SEQ ID NO: 194 - DNA, 379 bp, Homo sapiens
caggtgcagctggtgcagtctggggcagaggtgaagaagcctggggcctcagtgaaggtctcctgcgggacttctggatacaccttcaccaactactatatacattgggtgcggcaggcccctggacatgggcttgagtggatggcctggatcaaccctagcggtggtgccacaatctatgcagaggcttttgagggcagggtcgccgtaaccacggacacgtccatgaaaacagtctacatggagttggagagcctgacgtctggcgacacggccatgtatttctgcgccagagatgcgactccgataactacggaatttgactactggggccagggaacactgatcaccgtctcctcacgcctccaccaacggccca

SEQ ID NO: 195 - DNA, 360 bp, Homo sapiens; identical to SEQ ID NO: 193

SEQ ID NO: 196 - DNA, 384 bp, Homo sapiens
caggtgcagctggtgcagtctggggctgaggtgaagaggcctggggcctccgtgagggtcgcctgcaagacttctggttacacgttcaccgactaccatattcattgggtgcgacaggcccctggacaagggcttgagtggatgggatattttaaccctcgcactggtgagacagactatgcacagaaatttcaggacagaatcactatgactggggacgtgtccatgagcacagcctatttggagttgagcggactgagatctggcgacacggccgtctattactgtgcgaggccccttgccctgtattgtagtagttccaagtgttacacattgtgggctcttgatatctggggccagggacaatggtcaccgtctctgcag

SEQ ID NO: 197 - DNA, 360 bp, Homo sapiens
caggtgcagctggtgcagtctggggcagaggtgaagaagcctggggcctcagtgaaggtctcctgcgggacttctggatacaccttcaccaactactatatacattgggtgcggcaggcccctggacatgggcttgagtggatggcctggatcaaccctagcggtggtgccacaatctatgcagaggcttttgagggcagggtcaccgtaaccacggacacgtccatgaaaacagtctacatggagttggagagcctgacatctggcgacacggccatgtatttctgcaccagagatgcgactccgataactacggaatttgactactggggccagggaacactgatcaccgtctcctca

SEQ ID NO: 198 - DNA, 378 bp, Homo sapiens
caggtgcagctggtgcagtctggggcagaggtgaagaagcctggggcctcagtgaaggtctcctgcgggacttctggatacaccttcaccaactactatatacattgggtgcggcaggcccctggacatgggcttgagtggatggcctggatcaaccctagcggtggtgccacaatctatgcagaggcttttgagggcagggtcaccgtaaccacggacacgtccatgaaaacagtctacatggagttggagagcctgacatctggcgacacggccatgtatttctgcgccagggatgcgactccgataactacggaatttgactactggggccagggaacactgatcaccgtctcctcacgcctccaccaacggccc

SEQ ID NO: 199 - DNA, 409 bp, Homo sapiens
caggtgcagctggtgcagtctggggcagaggtgaagaagcctggggcctcagtgaaggtctcctgcgggacttctggatacaccttcaccaactactatatacattgggtgcggcaggcccctggacatgggcttgagtggatggcctggatcaaccctagcggtggtgccacaatctatgcagaggcttttgagggcagggtcaccgtaaccacggacacgtccacgaaaacagtctacatggagttggagagcctgacatctggcgacacggccatgtatttctgcgccagagatgcgactccgataactacggaatttgactactggggccagggaacactgatcaccgtctcctcagcctccaccaagggcccatcggtcttcccccgtggccaccctcctccaa

SEQ ID NO: 200 - DNA, 363 bp, Homo sapiens
caggtgcagctggtgcagtctggggcagaggtgaagaagcctggggcctcagtgaaggtctcctgcgggacttctggatacaccttcaccaactactatatacattgggtgcggcaggccccctggacatgggcttgagtggatggcctggatcaaccctagcggtggtgccacaatctatgcagaggcttttgagggcaggtcaccgtaaccacggacacgtccatgaaaacagtctacatggagttggagagcctgacatctggcgacacggccatgtatttctgcgccagagatgcgactccgataactacggaattgaactactggggaccagggaacactgatcaccgtctcctcacg

SEQ ID NO: 201 - DNA, 363 bp, Homo sapiens
caggtgcagctggtgcagtctggggctgaggtgaagaagcctggggcctcaatgagggtctcatgtcagacttcaggatacacgtttaactcctattatatacactggatgcgccaggtccctggacaaggccttgagtggatgggatggattaaccctaatagtggttacacaaactatacacagaaatttcagggaagggtcaccatgaccagggatacgtccattaacacagcctacctggagctcagtgccctgagatctgacgagacggccgtttattattgtgcgagagactttagcgacggttggccttactccttcgacttctggggccagggaactctagtcaccgtctcctca

SEQ ID NO: 202 - DNA, 414 bp, Homo sapiens
caggtgcagctggtgcagtctggggctgaggtgaagaggcctggggcctcaatgagggtctcatgtcagacttcaggatacacgtttaactcctattatatacactggatgcgccaggtccctggacaaggccttgagtggatggggtggattaaccctaatagtggttacacaaactatacacagaaatttcagggaagggtcaccatgaccagggatacgtccattaacacagcctacctggagctcagtgccctgagatctgacgagacggccgtttattattgtgcgagagactttagcgacggttggccttactccttcgacttctggggccagggaactctagtcaccgtctcctcagcctccaccaggcccatcggtcttcccctcggccaccctcctccaacgacg

SEQ ID NO: 203 - DNA, 370 bp, Homo sapiens
caggtgcagctggtgcagtctggggcagaggtgaagaagcctggggcctcagtgaaggtctcctgcgggacttctggatacaccttcaccaactactatatacattgggtgcggcaggcccctggacatgggcttgagtggatggcctggatcaaccctagcggtggtgccacaatctatgcagaggcttttgagggcagggtcaccgtaaccacggacacgtccatgaaaacagtctacatggattggagcagcctgacatctggcgacacggccatgtatttctgcgccagagatgcgactccgataactacggaatttgactactggggccagggaacactgatcaccgtctcctcacgcctccacc

SEQ ID NO: 204 - DNA, 370 bp, Homo sapiens
caggtgcagctggtgcagtctggggcagaggtgaagaagcctggggcctcagtgaaggtctcctgcgggacttctggatacaccttcaccaactactatatacattgggtgcggcaggcccctggacatgggcttgagtggatggcctggatcaaccctagcggtggtgccacaatccatgcagaggcttttgagggcagggtcaccgtaaccacggacacgtccatgaaaacagtctacatggagttggagagcctgacatctggcgacacggccatgtatttctgcgccagagatgcgactccgataactacggaatttgactactggggccagggaacactgatcaccgtctcctcacgcctccacc

SEQ ID NO: 205 - DNA, 400 bp, Homo sapiens
caggtgcagctggtgcagtctggggcagaggtgaagaagcctggggcctcagtgaaggcctcctgcgggacttctggatacaccttcaccaactactatatacattgggtgcggcaggcccctggacatgggcttgagtggatggcctggatcaaccctagcggtggtgccacaatctatgcagaggcttttgagggcagggtcaccgtaaccacggacacgtccatgaaaacagtctacatggagttggagagcctgacatctggcgacacggccatgtatttctgcgccagagatgcgactccgataactacggaatttgactactggggccagggaacactgatcaccgtctcctcacgcctccaccaacggcccatccggtccttccccctcggcc

SEQ ID NO: 206 - DNA, 366 bp, Homo sapiens
caggtgcagctggtgcggtctggggcagaggtgaagaagcctggggcctcagtgaaggtctcctgcgggacttctggatacaccttcaccaactactatatacattgggtgcggcaggcccctggacatgggcttgagtggatggcctggatcaaccctagcggtggtgccacaatctatgcagaggcttttgagggcagggtcaccgtaaccacggacacgtccatgaaaacagtctacatggagttggagagcctgacatctggcgacacggccatgtatttctgcgccagagatgcgactccgataactacggaatttgactactggggccagggaacactgactcaccgtctcctcacgcct

SEQ ID NO: 207 - DNA, 359 bp, Homo sapiens
caggtgcagctggtgcagtctgggtcagaggtgaagaagcctggggcctcagtgaaggtctcctgcgggacttctggatacaccttcagtaatcactatatacattgggtgcgacaggcccctggacacgggcttgagtggatggcctggatcaatcctagcggtggtgccacaatctattcagagaattttgagggcagggtcaccgtaaccagggacacgtccatgaaaacagtctacatggaattgaacagtctgacatctggcgacacggccgtctattattgtgccagagatgcgactccaataactacggaatttgactactggggccagggacactgatcaccgtctcctca

SEQ ID NO: 208 - DNA, 372 bp, Homo sapiens
caggtgcagctggtgcagtctggggcagaggtgaagaagcctggggcctcagtgaaggtctcctgcgggacttctggatacgccttcaccaactactatatacattgggtgcggcaggcccctggacatgggcttgagtggatggcctggatcaaccctagcggtggtgccacaatctatgcagaggcttttgagggcagggtcaccgtaaccacggacacgtccatgaaaacagtctacatggagttggagagcctgacatctggcgacacggccatgtatttctgcgccagagatgcgactccgataactacggaatttgactactggggccagggaacactgatcaccgtctcctcacgcctccaccaa

SEQ ID NO: 209 - DNA, 360 bp, Homo sapiens
caggtgcagctggtgcagtctggggcagaggtgaagaagcctggggcctcagtgaaggtctcctgcgggacttctggatacaccttcaccaactactatatacattgggtgcggcaggcccctggacatgggcttgagtggatggcctggatcaaccctagcggtggtgccacaatctatgcagaggcttttgagggcagggtcaccgtaaccacgggcacgtccatgaaaacagtctacatggagttggagagcctgacatctggcgacacggccatgtatttctgcgccagagatgcgactccgataactacggaatttgactactggggccagggaacactgatcaccgtctcctca

SEQ ID NO: 210 - DNA, 380 bp, Homo sapiens
caggtgcagctggtgcagtctggggcagaggtgaagaagcctggggcctcagtgaaggtctcctgcgggacttctggatacaccttcaccaactactatatacaattgggtgcggcaggcccctggacatgggcttgagtggatggcctggatcaaccctagcggtggtgccacaatctatgcagaggcttttgagggcagggtcaccgtaacacggacacgtccatgaaaacagtctacatggagttggagagcctgacatctggcgacacggccatgtatttctgcgccagagatgcgactccgataactacggaatttgactactggggccagggaacactgatcaccgtctcctcacgcctccaccgaacgggccc

SEQ ID NO: 211 - DNA, 360 bp, Homo sapiens
caggtgcagctggtgcagtctggggcagaggtgaagaagcctggggcctcagtgaaggtctcctgcgggacttctggatacaccttcaccaactactatatacattgggtgcggcgggcccctggacatgggcttgagtggatggcctggatcaaccctagcggtggtgccacaatctatgcagaggcttttgagggcagggtcaccgtaaccacggacacgtccatgaaaacagtctacatggagttggagagcctgacatctggcgacacggccatgtatttctgcgccagagatgcgactccgataactacggaatttgactactggggccagggaacactgatcaccgtctcctca

SEQ ID NO: 212 - DNA, 369 bp, Homo sapiens
caggtgcagctggtgcggtctgggcctgccgtgaagaagcctgggacctcagtgaaggtctcctgtaaggcttctagatacagctttaccgccttctatatgcattgggtgcgacaggcccctagacatggccttgagtgggtgggatggatcgaaccgaacagtggtggcaccagttatggacagaggtttcagggcagggtgaccctgaccagggacgcgtccatcaacactttctacatggaattgagcagcctgacagatgacgactcggccgtttactactgtgcgagagatggtggtgggtccgcctttcacggaccctatgatctttggggtcaagggcactggtcaccgtctcttcagcct

SEQ ID NO: 213 - DNA, 360 bp, Homo sapiens
caggtgcagctggtgcagtctggggcagaggtgaagaagcctggggcctcagtgaaggtctcctgcgggacttctggatacaccttcaccaactactatatacattgggtgcggcaggcccctggacatgggcttgagtggatggcctggatcaaccctagcggtggtgccacaatctatgcagaggcttttgagagcagggtcaccgtaaccacggacacgtccatgaaaacagtctacatggagttggagagcctgacatctggcgacacggccatgtatttctgcgccagagatgcgactccgataactacggaatttgactactggggccagggaacactgatcaccgtctcctca

SEQ ID NO: 214 - DNA, 416 bp, Homo sapiens
caggtgcagctggtgcagtctggggcagaggtgaagaagcctggggcctcagtgaaggtctcctgcgggacttctggatacaccttcaccaactactatatacattgggtgcggcaggcccctggacatgggtttgagtggatggcctggatcaaccctagcggtggtgccacaatctatgcagaggcttttgagggcagggtcaccgtaaccacggacacgtccatgaaaacagtctacatggagttggagagcctgacatctggcgacacggccatgtatttctgcgccagagatgcgactccgataactacggaatttgactactggggccagggaacactgatcaccgtctcctcagggagtgcatcccgccctaacccttttccccctcgtcctcctctgacgaacttccc

SEQ ID NO: 215 - DNA, 359 bp, Homo sapiens
caggtgcagctggtgcagtctggggcagaggtgaagaagcctggggcctcagtgaaggtctcctgcgggacttctggatacaccttcaccaactactatatacattgggtgcggcaggcccctggacatgggcttgagtggatggcctggatcaaccctagcggtggtgccacaatctatgcagaggcttttgagggcagggtcaccgtaaccacggacacgtccatgaaaacagtctacatggagttggagagcctgacatctggcggcacggccatgtatttctgcgccagagatgcgactccgataactacggaatttgactactggggccagggaacactgatcaccgtctcctc

SEQ ID NO: 216 - DNA, 379 bp, Homo sapiens
caggtgcagctggtgcagtctggagcagaggtgaaaaagccgggggagtctctgaaaatctcctgtaagggttctggatacaccttcaccgactactatattcactgggtgcgacaggcccctggacaacgtcttgagtggatgggatggttcaatcctaacactggtggcgcacactatggactggactatcagggcagagtcactatgaccggggacacgtccatgaccacagtctacatggagttgaccaggctggcatccgacgacacggccatttattattgtgcgagagagggactttgtagaactaccagctgccaatttgactactggggccagggcaccctggtcaccgtctcctcacgcctccaccgac

SEQ ID NO: 217 - DNA, 364 bp, Homo sapiens
caggtgcagctggtgcagtctggggctgaggtgaagaagcctggggcctcaatgagggtctcatgtcagacttcaggatacacgtttaactcctattatatacactggatgcgccaggtccctggacaaggccttgagtggatgggatggattaaccctaatagtggttacacaaactatacacagaaatttcagggaagggtcaccatgaccagggatacgtccattaacacagcctacctggagctcagtgccctgagatctgacgagacggccgtttattattgtgcgagagactttagcgacggttggccttactccttcgacttctggggccagggaactctagtcaccgtctcctcag

SEQ ID NO: 218 - DNA, 426 bp, Homo sapiens
caggtgcagctggtgcagtctggggcagaggtgaagaagcctggggcctcagtgaaggcctcctgcgggacttctggatacaccttcaccaactactatatacattgggtgcggcaggcccctggacatgggcttgagtggatggcctggatcaaccctagcggtggtgccacaatctatgcagaggcttttgagggcagggtcaccgtaaccacggacacgtccatgaaaacagtctacatggagttggagagcctgacatctggcgacacggccatgtatttctgcgccagagatgcgactccgataactacggaatttgactactggggccagggaacactgatcaccgtctcctcagcctccaccaacggcccatccggtccttcccccgtcggccaccctcctcccaagacgccacctcgt

SEQ ID NO: 219 - DNA, 367 bp, Homo sapiens
caggtgcagctggtgcggtctggggctgaggtgaagaagcctggggcctcaatgagggtctcatgtcagacttcaggatacacgtttaactcctattatatacactggatgcgccaggtccctggacaaggccttgagtggatggggtggattaaccctaatagtggttacacaaactatacacagaaatttcagggaagggtcaccatgaccagggatacgtccattaacacagcctacctggagctcagtgccctgagatctgacgaggcggccgtttattattgtgcgagagactttagcgacggttggccttactccttcgacttctggggccagggaactctagtcaccgtctcctcagcct

SEQ ID NO: 220 - DNA, 355 bp, Homo sapiens
caggtgcagctgatgcagtctggggcagaggtgaagaagcctggggcctcagtgaaggtctcctgcgggacttctggatacaccttcaccaactactatatacattgggtgcggcaggcccctggacatgggcttgagtggatggcctggatcaaccctagcggtggtgccacaatctatgcagaggcttttgagggcagggtcaccgtaaccacggacacgtccatgaaaacagtctacatggagttggagagcctgacatctggcgacacggccatgtatttctgcgccagagatgcgactccgataactacggaatttgactactggggccagggaacacggtcaccgtctc

SEQ ID NO: 221 - DNA, 383 bp, Homo sapiens
caggtgcagctggtgcagtctggggctgaggtgaagaagcctggggcctcaatgagggtctcatgtcagacttcaggatacacgtttaactcctattatatacactggatgcgccaggtccctggacaaggccttgagtggatggggtggattaaccctaatagtggttacacaaactatacacagaaatttcagggaagggtcaccatgaccagggatacgtccattaacacagcctacctggagctcagtgccctgagatctgacgagacggccgtttattattgtgcgagagactttagcaacggttggccttactccttcgacttctggggccagggaactctagtcaccgtctcctcacgcctccaccaacgggccca

SEQ ID NO: 222 - DNA, 417 bp, Homo sapiens
caggtgcagctggtgccgtctggggcagaggtgaagaagcctggggcctcagtgaaggtctcctgcgggacttctggatacaccttcaccaactactatatacattgggtgcggcaggcccctggacatgggcttgagtggatggcctggatcaaccctagcggtggtgccacaatctatgcagaggcttttgagggcagggtcaccgtaaccacggacacgtccatgaaaacagtctacatggagttggagagcctgacatctggcgacacggccatgtatttctgcgccagagatgcgactccgataactacggaatttgactactggggccagggaacactgatcaccgtctcctcacgcctccaccaacgggcccatccggtccttccccctggccaccctcctccaacgacg

SEQ ID NO: 223 - DNA, 417 bp, Homo sapiens
caggtgcagctggtgcagtttggggctgaggtgaagaagcctgggtcctcggtgaaggtctcctgcaaggcttctggatacagcttcaccgactattatatacactgggtgcgacaggcccctggaaaacgtcttgagtgggtggggtggttcaatcctaagactggtggcgcgcactatggactggactatcagggcagagtgacgatgaccgggggcacgtccatcaccacagtctacatggagttgaccagattggcatccgacgacacggccatgtattattgtgcgagagaggagtttgagaactaccagctgccaattgacttctggggccagggaacgctggtcaccgtcttctcagcctccaccaacggccatccggtcttccccctcggccaccctcctccaacgacg

SEQ ID NO: 224 - DNA, 365 bp, Homo sapiens
caggtgcagctggtgcagtctgggtcagaggtgaagaagcctggggcctcagtgaaggtctcctgcgggacttctggatacaccttcagtaatcactatatacattgggtgcgacaggcccctggacacgggcttgagtggatggcctggatcaatcctagcggtggtgccacaatctattcagagaattttgagggcagggtcaccgtaaccagggacacgtccatgaaaacagtctacatggaattgaacagtctgacatctggcgacacggccgtctattattgtgccagagatgcgactccaataactacagaatttgactactggggccagggaacgctgatcaccgtctcctcacgcct

SEQ ID NO: 225 - DNA, 406 bp, Homo sapiens
  misc_feature (235)..(235): n is a, c, g, or t
caggtgcagctggtgcagtctggggcagaggtgaagaagcctggggcctcagtgaaggtctcctgcgggacttctggatacaccttcaccaactactatatacattgggtgcggcaggcccctggacatgggcttgagtggatggcctggatcaaccctagcggtggtgccacaatctatgcagaggcttttgagggcagggtcaccgtaaccacggacacgtccatgaaaaccngtctacatggagttggagagcctgacatctggcgacacggccatgtatttctgcgccagagatgcgactccggataactacggaatttgactacgtggggccagggaacactgatcaccgtctcctcacgcctccaccaacgggcccactccggtccttcccccgtcggcc

SEQ ID NO: 226 - DNA, 404 bp, Homo sapiens
caggtgcagctggtgcagtctggggcagaggtgaagaagcctggggcctcagtgaaggtctcctgcgggacttctggatacaccttcaccaactactatatacattgggtgcggcaggcccctggacatgggcttgagtggatggcctggatcaaccctggcggtggtgccacaatctatgcagaggcttttgagggcagggtcaccgtaaccacggacacgtccatgaaaacagtctacatggagttggagagcctgacatctggcgacacggccatgtatttctgcgccagagatgcgactccgataactacggaatttgactactggggccagggaacactgatcaccgtctcctcacgcctccaccaagggcccatccggtccttccccctcggccaccc

SEQ ID NO: 227 - DNA, 360 bp, Homo sapiens
caggtgcagctggtgcagtctggggcagaggtgaagaagcctggggtctcagtgaaggtctcctgcgggacttctggatacaccttcaccaactactatatacattgggtgcggcaggcccctggacatgggcttgagtggatggcctggatcaaccctagcggtggtgccacaatctatgcagaggcttttgagggcagggtcaccgtaaccacggacacgtccatgaaaacagtctacatggagttggagagcctgacatctggcgacacggccatgtatttctgcgccagagatgcgactccgataactacggaatttgactactggggccagggaacactgatcaccgtctcctca

SEQ ID NO: 228 - DNA, 379 bp, Homo sapiens
caggtgcagctggtgcagtctggggcagaggtgaagaagcctggggcctcagtgaaggtctcctgcgggacttctggatacaccttcaccaactactatatacattgggtgcggcaggcccctggacatgggcttgagtggatggcctggatcaaccctagcggtggtgccacaatctatgcagaggcttttgagggcagggtcaccgtaaccacggacacgtccatgaaaacagtctacatggagttggagaacctgacatctggcgacacggccatgtatttctgcgccagagatgcgactccgataactacggaatttgactactggggccagggaacactgatcaccgtctcctcacgcctccaccaacgggccc

SEQ ID NO: 229 - DNA, 352 bp, Homo sapiens
caggtgcagctggtgcagtctggggctgaggtgaagaagcctggggcctcaatgagggtctcatgtcagacttcaggatacacgtttaactcctattatatacactggatgcgccaggtccctggacaaggccttgagtggatggggtggattaaccctaatagtggttacacaaactatacacagaaatttcagggaagggtcaccatgaccagggatacgtccattaacacagcctacctggagctcagtgccctgagatctgacgagacggccgtttattattgtgcgagagtactttagcgtacggttggccttactccttcgacttcgtggggccagggaactcgta

SEQ ID NO: 230 - DNA, 439 bp, Homo sapiens
caggtgcagctggtgcaatctggggctgaggtgaagaagcctggggcctcagtgaaggtctcctgtaaggcttctagatacacggtaaacggccgctttatccactgggtgcgacaggcccctggacaagggctggagtggctgggttggatcaagcctaacagtgaaagcaccaactatgcatggaagtttcggggccgggtcagcatgaccggtgacacgtccatcaacacggtctacatggagttgagaagtctgagatctgacgacacggccgtatattactgcgcttcctgcgaccggcgtggtgggatttgcatcgatgtggaaggggggggctactacgctatggacgtctggggccaagggacctcggtcaccgtctcctcagcttccaccaagggcccatcggtcttccccctggcgccctgctccagga

SEQ ID NO: 231 - DNA, 383 bp, Homo sapiens
caggtgcagctggtgcagtctggggctgaggtgaagaagcctggggcctcaatgagggtctcatgtcagacttcaggatacacgtttaactcctattatatacactggatgcgccaggtccctggacaaggccttgagtggatggggtggattaaccctaatagtggttacacaaactatacacagaaatttcagggaagggtcaccatgaccagggatacgtccattaacacagcctacctggagctcagtgccctgagatctgacgagacggccgtttattattgtgcgagagactttagcgacggttggccttactccttcgacttctggggccagggaactctagtcaccgtctcctcacgcctccaccaacgggccca

SEQ ID NO: 232 - DNA, 365 bp, Homo sapiens
caggtgcagctggtgcagtcaggggctgaggtgaagaagcctgggtcctcagtgaaggtctcctgcgggacttctggatacaccttcaccaactactatatacattgggtgcggcaggcccctggacatgggcttgagtggatggcctggatcaaccctagcggtggtgccacaatctatgcagaggcttttgagggcagggtcaccgtaaccacggacacgtccatgaaaacagtctacatggagttggagagcctgacatctggcgacacggccatgtatttctgcgccagagatgcgactccgataactacggaatttgactactggggccagggaacactgatcaccgtctcctcacgcct

SEQ ID NO: 233 - DNA, 362 bp, Homo sapiens
caggtgcagctggtgcagtctgggcctgaagtgaagaagcctggggcctcactgaaggtctcctgtaaggcctccggatacaccttcatcgattattatattcactgggtgcgacaagtccctggacaacggcttgagtggatgggttggatcaaccctaagacaactggcgcactctatgcagacaactttcagggtagggtcaccatgaccagggacacctccataagtacagcttacatggaattgaggaatctgagatctgaggacacggccgtgtactactgtgcgagatggggcgtggaattactatgataggtatggacgtcgtggggccaaggggacccacggtcaccgtctcc

SEQ ID NO: 234 - DNA, 490 bp, Homo sapiens
caggtgcagctggtgcagtctggggctgaggtgaagaagcctggggcctcaatgagggtctcatgtcagacttcaggatacacgtttaactcctattatatacactggatgcgccaggtccctggacaaggccttgagtggatgggatggattaaccctaatagtggttacacaaactatacacagaaatttcagggaagggtcaccatgaccagggatacgtccattaacacagcctacctggagctcagtgccctgagatctgacgagacggccgtttattattgtgcgagagactttagcgacggttggccttactccttcgacttctggggccagggaactctagtcaccgtctcctcagcctccaccaaggcccatcggtcttccccctggcaccctcctccaacgacgcacctctggggcacagcggccctgggctgcctggtcaaggactacttcccgaaccggtgacggtgtcgtggaactc

SEQ ID NO: 235 - DNA, 360 bp, Homo sapiens
caggtgcagctggtgcagtctggggcagaggtgaagaagcctggggcctcagtgaaggtctcctgcgggacttctggatacaccttcaccaactactatatacattgggtgcggcaggcccctggacatgggcttgagtggatggcctggatcaaccctagcggtagtgccacaatctatgcagaggcttttgagggcagggtcaccgtaaccacggacacgtccatgaaaacagtctacatggagttggagagcctgacatctggcgacacggccatgtatttctgcgccagagatgcgactccgataactacggaatttgactactggggccagggaacactgatcaccgtctcctca

SEQ ID NO: 236 - DNA, 367 bp, Homo sapiens
caggtgcagctggtgcagtctgggtcagaggtgaagaagcctggggcctcagtgaaggtctcctgcgggacttctggatacaccttcagtaatcactatatacattgggtgcgacaggcccctggacacgggcttgagtggatggcctggatcaatcctagcggtggtgccacaatctattcagagaattttgagggcagggtcaccgtaaccagggacacgtccatgaaaacagtctacatggaattgaacagtctgacatctggcgacacggccgtctattattgtgccagagatgcgactccaataactacagaatttgactactggggccagggaacgctgatcaccgtctcctcacgcctcc

SEQ ID NO: 237 - DNA, 365 bp, Homo sapiens
caggtgcagctggtgcagtctggggcagaggtgaagaagcctggggcctcagtgaaggtctcctgcgggacttctggatacaccttcaccaactactatatacattgggtgcggcaggcccctggacatgggcttgagtggatggcctggatcaaccctagcggtggtgccacaatctatgcagaggcttttgagggcagggtcaccgtaaccacggacacgtccatgaaaacagtctacatggagttggagagcctgacatctggcgacacggccacgtatttctgcgccagagatgcgactccgataactacggaatttgactactggggccagggaacactgatcaccgtctcctcacgcct

SEQ ID NO: 238 - DNA, 385 bp, Homo sapiens
caggtgcagctggtgcggtctggggcagaggtgaagaagcctggggcctcagtgaaggtctcctgcgggacttctggatacaccttcaccaactactatatacattgggtgcggcaggcccctggacatgggcttgagtggatggcctggatcaaccctagcggtggtgccacaatctatgcagaggcttttgagggcagggtcaccgtaaccacggacacgtccatgaaaacagtctacatggagttggagagcctgacatctggcgacacggccatgtatttctgcgccagagatgcgactccgataactacggaatttgactactggggccagggaacactgatcaccgtctcctcagcctccaccaaggcccatcggtctt

SEQ ID NO: 239 - DNA, 371 bp, Homo sapiens
caggtgcagctggtgcagtctggggcagaggtgaagaagcctggggcctcagtgaaggtctcctgcgggacttctggatacaccttcatcaactactatatacattgggtgcggcaggcccctggacatgggcttgagtggatggcctggatcaaccctagcggtggtgccacaatctatgcagaggcttttgagggcagggtcaccgtaaccacggacacgtccatgaaaacagtctacatggagttggagagcctgacatctggcgacacggccatgtatttctgcgccagagatgcgactccgataactacggaatttgactactggggccagggaacactgatcaccgtctcctccgcctccaccaa

SEQ ID NO: 240 - DNA, 365 bp, Homo sapiens
caggtgcagctggtgcagtctggggcagaggtgaagaagcctggggcctcagtgaaggtctcctgcgggacttctggatacaccttcaccaactactatatacattgggtgcggcaggcccctggacatgggcttgagtggatggcctgggtcaaccctagcggtggtgccacaatctatgcagaggcttttgagggcagggtcaccgtaaccacggacacgtccatgaaaacagtctacatggagttggagagcctgacatctggcgacacggccatgtatttctgcgccagagatgcgactccgataactacggaattgactacgtggggccagggaacactgatcaccgtctcctcacgcct

SEQ ID NO: 241 - DNA, 360 bp, Homo sapiens
caggtgcagctggtgcagtctggggcagaggtgaagaagcctggggcctcagtgaaggtctcctgcgggacttctggatacaccttcaccaactactatatacattgggtgcggcaggcccctggacatgggcttgagtggatggcctggatcaaccctagcggtggtgccacaatctatgcagaggcttttgagggcagggtcaccgtaaccacggacacgtccatgaaaacagtctacatggagttggagagcctgacatctggcgacacggccatgtatttctgcgccagagatgcgactccgataactacggaatttgactactggggccagggaacactgatcaccgtctcctca

SEQ ID NO: 242 - DNA, 360 bp, Homo sapiens; identical to SEQ ID NO: 241

SEQ ID NO: 243 - DNA, 370 bp, Homo sapiens
caggtgcagctggtgcagtctggggcagaggtgaagaagcctggggcctcagtgaaggtctcctgcgggacttctggatacaccttcaccaactactatatacattgggtgcggcaggcccctggacatgggcttgagtggatggcctggatcaaccctagcggtggtgccacaatctatgcagaggcttttgagggcagggtcaccgtaaccacggacacgtccatgaaaacagtctacatggagttggagagcctgacatctggcgacacggccatgtatttctgcgccagagatgcgactccgataactacggaatttgactactggggccagggaacactgatcaccgtctcctcacgcctccacc

SEQ ID NO: 244 - DNA, 360 bp, Homo sapiens; identical to SEQ ID NO: 241

SEQ ID NO: 245 - DNA, 362 bp, Homo sapiens
caggtgcagctggtgcagtctggggcagaggtgaagaagcctggggcctcagtgaaggtctcctgcgggacttctggatacaccttcaccaactactatatacattgggtgcggcaggcccctggacatgggcttgagtggatggcctggatcaaccctagcggtggtgccacaatctatgcagaggcttttgagggcagggtcaccgtaaccacggacacgtccatgaaaacagtctacatggagttggagagcctgacatctggcgacacggccatgtatttctgcgcagagatgcgactccgataactacggaatttgactacgtggggccagggaacactgatcaccgtctcctcacg

SEQ ID NO: 246 - DNA, 370 bp, Homo sapiens; identical to SEQ ID NO: 243

SEQ ID NO: 247 - DNA, 364 bp, Homo sapiens
caggtgcagctggtgcagtctggggcagaggtgaagaagcctggggcctcagtgaaggtctcctgcgggacttctggatacaccttcaccaactactatatacattgggtgcggcaggcccctggacatgggcttgagtggatggcctggatcaaccctagcggtggtgccacaatctatgcagaggcttttgagggcagggtcaccgtaaccacggacacgtccatgaaaacagtctacatggagttggagagcctgacatctggcgacacggccatgtatttctgcgccagagatgcgactccgataactacggaatttgactactggggccagggaacactgactccaccgtctcctcacg

SEQ ID NO: 248 - DNA, 403 bp, Homo sapiens
caggtgcagctggtgcagtctggggcagaggtgaagaagcctggggcctcagtgaaggtctcctgcgggacttctggatacaccttcaccaactactatatacattgggtgcggcaggcccctggacatgggcttgagtggatggcctggatcaaccctagcggtggtgccacaatctatgcagaggcttttgagggcagggtcaccgtaaccacggacacgtccatgaaaacagtctacatggagttggagagcctgacatctggcgacacggccatgtatttctgcgccagagatgcgactccgataactacggaatttgactactggggccagggaacactgatcaccgtctcctcacgcccccaccaacgggcccactccggtccttccccctcggcca

SEQ ID NO: 249 - DNA, 366 bp, Homo sapiens
caggtgcagctggtgcagtctgggcctgccgtgaagaagcctgggacctcagtgaaggtctcctgtaaggcttctagatacagctttaccgccttctatatgcattgggtgcgacaggcccctagacatggccttgagtgggtgggatggatcgaaccgaacagtggtggcaccagttatggacagaggtttcagggcagggtgaccctgaccagggacgcgtccatcaacactttctacatggaattgagcagcctgacagatgacgactcggccgtttactactgtgcgagagatggtggtgggtccgcctttcacggaccctatgatctttggggtcaagggacactggtcaccgtctcttca

SEQ ID NO: 250 - DNA, 360 bp, Homo sapiens; identical to SEQ ID NO: 241

SEQ ID NO: 251 - DNA, 426 bp, Homo sapiens
caggtgcagctggtgcagtctggggcagaggtgaagaagcctggggcctcagtgaaggtctcctgcgggacttctggatacaccttcaccaactactatatacattgggtgcggcaggcccctggacatgggcttgagtggatggcctggatcaaccctagcggtggtgccacaatctatgcagaggcttttgagggcagggtcaccgtaaccacggacacgtccatgaaaacagtctacatggagttggagagcctgacatctggcgacacggccatgtatttctgcgccagagatgcgactccgataactacggaatttgactactggggccagggaacactgatcaccgtctcctcagcctccaccaacggcccactcggtccttccccctcggccaccctcctcccaacgacgccacctcgt

SEQ ID NO: 252 - DNA, 369 bp, Homo sapiens
caggtgcagctggtgcagtctggggcagaggtgaagaagcctggggcctcagtgaaggtctcctgcgggacttctggatacaccttcaccaactactatatacattgggtgcggcaggcccctggacatgggcttgagtggatggcctggatcaaccctagcggtggtgccacaatctatgcagaggcttttgagggcagggtcaccgtaaccacggacacgtccatgaaaacagtctacatggagttggagagcctgacatctggcgacacggccatgtatttctgcgccagagatgcgactccgataactacggaatttgactactggggccagggaacactgatcaccgtctcctcagcctccacc

SEQ ID NO: 253 - DNA, 443 bp, Homo sapiens
caggtgcagctggtgcagtctggggcagaggtgaagaagcctggggcctcagtgaaggtctcctgcgggacttctggatacaccttcaccaactactatatacattgggtgcggcaggcccctggacatgggcttgagtggatggcctggatcaaccctagcggtggtgccacaatctatgcagaggcttttgagggcagggtcaccgtaaccacggacacgtccatgaaaacagtctacatggagttggagagcctgacatctggcgacacggccatgtatttctgcgccagagatgcgactccgataactacggaatttgactactggggccagggaacactgatcaccgtctcctcagcctccaccaaggcccatcggtcttccccctggcaccctcctccaagacgcacctctggggcacagcagccctggctgcctgg

SEQ ID NO: 254 - DNA, 415 bp, Homo sapiens
caggtgcagctggtgcagtctggggctgaggtgaagaagcctggggcctcaatgagggtctcatgtcagacttcaggatacacgtttaactcctattatatacactggatgcgccaggtccctggacaaggccttgagtggatggggtggattaaccctaatagtggttacacaaactatacacagaaatttcagggaagggtcaccatgaccagggatacgtccattaacacagcctacctggagctcagtgccctgagatccgacgagacggccgtttattattgtgcgagagactttagcgacggttggccttactccttcgacttctggggccagggaactctagtcaccgtctcctcagcctccaccaaggcccatcggtcttccccctggccaccctcctccaacgacg

SEQ ID NO: 255 - DNA, 370 bp, Homo sapiens
caggtgcagctggtgcagtctggggcagaggtgaagaagcctggggcctcagtgaaggtctcctgcgggacttctggatacaccttcaccaactactatatacattgggtgcggcaggcccctggacatgggcttgagtggatggcctggatcaaccctagcggtggtgccacaatctatgcagaggcttttgagggcagggtcaccgtaaccacggacacgtccatgaaaacagtctacatggagttggagagcctgacatctggcgacacggccatgtatttctgcgccagagatgcgactccgataactacggatttgactacgtggggccagggaacactgatcaccgtctcctcacgcctccacc

SEQ ID NO: 256 - DNA, 362 bp, Homo sapiens
caggtgcagctggtgcagtctggggctgaggtgaagaagcctggggcctcaatgagggtctcatgtcagacttcaggatacacgtttaactcctattatatacactggatgcgccaggtccctggacaaggccttgagtggatgggatggattaaccctaatagtggttacacaaactatacacagaaatttcagggaagggtcaccatgaccagggatacgtccattaacacagcctacctggagctcagtgccctgagatctgacgagacggccgtttattattgtgcgagagactttagcgacggttggccttactccttcgacttctggggccagggactctagtcaccgtctcctca

SEQ ID NO: 257 - DNA, 370 bp, Homo sapiens; identical to SEQ ID NO: 243

SEQ ID NO: 258 - DNA, 379 bp, Homo sapiens
caggtgcagctggtgcagtctggggcagaggtgaagaagcctggggcctcagtgaaggtctcctgcgggacttctggatacaccttcaccaactactatatacattgggtgcggcaggcccctggacatgggcttgagtggatggcctggatcaaccctagcggtggtgccacaatctatgcagaggcttttgagggcagggtcaccgtaaccacggacacgtccatgaaaacagtctacatggagttggagagcctgacatctggcgacacggccatgtatttctgcgccagagatgcgactccgataactacggaatttgactactggggccagggaacactgatcaccgtctcctcacgcctccaccaacggccca

SEQ ID NO: 259 - DNA, 360 bp, Homo sapiens; identical to SEQ ID NO: 241

SEQ ID NO: 260 - DNA, 365 bp, Homo sapiens; identical to SEQ ID NO: 184

SEQ ID NO: 261 - DNA, 374 bp, Homo sapiens
caggtgcagctggtgcagtctggggctgaggtgaagaagcctggggcctcaatgagggtctcatgtcagacttcaggatacacgtttaactcctattatatacactggatgcgccaggtccctggacaaggccttgagtggatgggatggattaaccctaatagtggttacacaaactatacacagaaatttcagggaagggtcaccatgaccagggatacgtccattaacacagcctacctggagctcagtgccctgagatctgacgagacggccgtttattattgtgcgagagactttagcgacggttggccttactccttcgacttctggggccagggaactctagtcaccgtctcctcagcctccaccaa

SEQ ID NO: 262 - DNA, 370 bp, Homo sapiens; identical to SEQ ID NO: 243

SEQ ID NO: 263 - DNA, 360 bp, Homo sapiens; identical to SEQ ID NO: 241

SEQ ID NO: 264 - DNA, 360 bp, Homo sapiens; identical to SEQ ID NO: 241

SEQ ID NO: 265 - DNA, 380 bp, Homo sapiens
caggtgcagctggtgcagtctggggcagaggtgaagaagcctggggcctcagtgaaggtctcctgcgggacttctggatacaccttcaccaactactatatacattgggtgcggcaggcccctggacatgggcttgagtggatggcctggatcaaccctagcggtggtgccacaatctatgcagaggcttttgagggcagggtcaccgtaaccacggacacgtccatgaaaacagtctacatggagttggagagcctgacatctggcgacacggccatgtatttctgcgccagagatgcgactccgataactacggaatttgactactggggccagggaacactgatcaccgtctcctcacgcctccaccaacgggccca

SEQ ID NO: 266 - DNA, 379 bp, Homo sapiens; identical to SEQ ID NO: 258

SEQ ID NO: 267 - DNA, 365 bp, Homo sapiens
  misc_feature (347)..(347): n is a, c, g, or t
caggtgcagctggtgcagtctggggttgaggtgaagaaacctggggcctcaatgaaggtctcctgcaaggcttctggatacagcttcaccgactattatatacactgggtgcgacaggcccctggaaaacgtcttgagtgggtggggtggttcaatcctaagactggtggcgcgcactatggactggactatcagggcagagtgacgatgaccggggacacgtccatcaccacagtctacatggagttgaccagattggcatccgacgacacggccatgtattattgtgcgagagagggagtttgtagaactaccagctgccaatttgacttctggggccagggacnctggtcaccgtcttctca

SEQ ID NO: 268 - DNA, 372 bp, Homo sapiens
caggtgcagctggtgcagtctggggctgaggtgaagaagcctggggcctcaatgagggtctcatgtcagacttcaggatacacgtttaactcctattatatacactggatgcgccaggtccctggacaaggccttgagtggatggggtggattaaccctaatagtggttacacaaactatacacagaaatttcagggaagggtcaccatgaccagggatacgtccattaacacagcctacctggagctcagtgccctgagatctgacgagacggccgtttattattgtgcgagagactttagcgacggttggccttactccttcgacttctggggccagggaactctagtcaccgtctcctcagcctccacc

SEQ ID NO: 269 - DNA, 373 bp, Homo sapiens
caggtgcagctggtgcagtctggggctgagatgaagaagcctggggcctcagtgagggtctcctgcagggcttctggatacagtctcagcgactatgggatgcactgggtgcgacaggcccctggacaagggcttgagtggatgggatggatcagacaaaacagtggtggcgcaacctatgcacagaaatttcaaggcagagtcatcatgagtagggacacgtccatcactacagacttcatagaactgagtagcctgacacttgacgacacggccgtatactattgtgcgagagcccagaggccagtggctgacgcacttgaacttgactattggggccagggaacactggtcaccgtctcgtcagcctcca

SEQ ID NO: 270 - DNA, 360 bp, Homo sapiens; identical to SEQ ID NO: 241

SEQ ID NO: 271 - DNA, 362 bp, Homo sapiens
caggtgcagctggtgcagtctggggcagaggtgaagaagcctggggcctcagtgaaggtctcctgcgggacttctggatacaccttcaccaactactatatacattgggtgcggcaggcccctggacatgggcttgagtggatggcctggatcaaccctagcggtggtgccacaatctatgcagaggcttttgagggcagggtcaccgtaaccacggacacgtccatgaaaacagtctacatggagttggagagcctgacatctggcgacacggccatgtatttctgcgccagagatgcgactccgataactacggaatttgactactggggccagggaacactgatcaccgtctcctcacg

SEQ ID NO: 272 - DNA, 360 bp, Homo sapiens
caggtgcagctggtgcagtctggggctgaggtgaagaagcctggggcctcagtgaaggtctcctgcgggacttctggatacaccttcaccaacgactatatacattgggtgcggcaggcccctggacatgggcttgagtggatggcctggatcaaccctagcggtggtgccacaatctatgcagaggcttttgagggcagggtcaccgtaaccacggacacgtccatgaaaacagtctacatggagttggagagcctgacatctggcgacacggccatgtatttctgcgccagagatgcgactccgataactacggaatttgactactggggccagggaacactgatcaccgtctcctca

SEQ ID NO: 273 - DNA, 372 bp, Homo sapiens; identical to SEQ ID NO: 268

SEQ ID NO: 274 - DNA, 365 bp, Homo sapiens
caggtgcagctggtgcagtctggggcagaggtgaagaagcctggggcctcagtgaaggtctcctgcgggacttctggatacaccttcaccaactactatatacattgggtgcggcaggcccctggacatgggcttgagtggatggcctggatcaaccctagcggtggtgccacaatctatgcagaggcttttgagggcagggtcaccgtaaccacggacacgtccatgaacacagtctacatggagttggagagcctgacatctggcgacacggccatgtattactgcgccagagatgcgactccgataacctacggaattgactactggggccagggaacactgatcaccgtctcctcacgcct

SEQ ID NO: 275 - DNA, 422 bp, Homo sapiens
caggtgcagctggtgcagtctggggcagaggtgaagaagcctggggcctcagtgaaggtctcctgcgggacttctggatacaccttcaccaactactatatacattgggtgcggcaggcccctggacatgggcttgagtggatggcctggatcaaccctagcggtggtgccacaatctatgcagaggcttttgagggcagggtcaccgtaaccacggacacgtccatgaaaacagtctacatggagttggagagcctgacatctggcgacacggccatgtatttctgcgccagagatgcgactccgataactacggaatttgactactggggccagggaacactgatcaccgtctcctcacgcctccaccaacggcccactcggtccttccccctcggccaccctcctccaacgacgccacc

SEQ ID NO: 276 - DNA, 360 bp, Homo sapiens
caggtgcagctggtgcagtctgggtctgaggtgaagaagcctggggcctcagtgaaggtctcctgcgggacttctggatacaccttcaccaactactatatacattgggtgcggcaggcccctggacatgggcttgagtggatggcctggatcaaccctagcggtggtgccacaatctatgcagaggcttttgagggcagggtcaccgtaaccacggacacgtccatgaaaacagtctacatggagttggagagcctgacatctggcgacacggccatgtatttctgcgccagagatgcgactccgataactacggaatttgactactggggccagggaacactgatcaccgtctcctca

SEQ ID NO: 277 - DNA, 370 bp, Homo sapiens
caggtgcagctggtgcagtctggaggagaggtgaagacgcctggggcctcagtgaaagtctcctgcaggacttcaggatacaccttcaccgcttactacatacactgggtgcgacaggcccctggacacgggcttgagtgggtggggtggatcaaccccagtggaggtgccacaatctatgcacagaagtttgagggcagggtcaccttgaccagcgacacgtccattagtacagcctatttggagttgagcaacctgagacctgacgacacggccacatattattgtgtaagagatgcgactccggtgacaacggaattcgacttctggggccagggagcgctggtcaccgtctcctcacgcctccacc

SEQ ID NO: 278 - DNA, 367 bp, Homo sapiens
caggtgcagctggtgcagtctggggcagaggtgaagaagcctggggcctcagtgaaggtctcctgcgggacttctggatacaccttcaccaactactatatacattgggtgcggcaggcccctggacatgggcttgagtggatggcctggatcaaccctagcggtggtgccacaatctatgcagaggcttttgagggcagggtcaccgtaaccacggacacgtccatgaaaacagtctacatggagttggagagcctgacatctggcgacacggccatgtatttctgcgccagagatgcgactccgataactacggaatttgactactggggccagggaacactgatcaccgtctcctcacgcctcc

SEQ ID NO: 279 - DNA, 440 bp, Homo sapiens
caggtgcagctggtgcagtctggggctgaggtgaagaggcctggggcctcagtgagggtcgcctgcaagacttctggttacacattcaccgactaccatattcattgggtgcgacaggcccctggacaagggcttgagtggatgggatatttcaaccctcgcactggtgagacagactatgcacagagatttcaggacagaatcactatgactggggacgtgtccatgagcacagcctatatggagttgagcggactgagatctggcgacacggccgtctattactgtgcgaggccccttgccctgtattgtagtagttccaagtgctacacattgtgggctcttgatatctggggccaggggacaatggtcaccgtctctgcatcttccaccaagggcccatcggtcttccccctggcgccctgctccaggacgcacct

SEQ ID NO: 280 - DNA, 360 bp, Homo sapiens; identical to SEQ ID NO: 241

SEQ ID NO: 281 - DNA, 420 bp, Homo sapiens
caggtgcagctggtgcagtctggggcagaggtgaagaagcctggggcctcagtgaaggtctcctgcgggacttctggatacaccttcaccaactactatatacattgggtgcggcaggcccctggacatgggcttgagtggatggcctggatcaaccctagcggtggtgccacaatctatgcagaggcttttgagggcagggtcaccgtaaccacggacacgtccatgaaaacagtctacatggagttggagagcctgacatctggcgacacggccatgtatttctgcgccagagatgcgactccgataactacggaattgactacgtggggccagggaacactgatcaccgtctcctcacgcctccaccgaacggcccactccggtccttccccctcggccaccctcctaccaacgacg

SEQ ID NO: 282 - DNA, 367 bp, Homo sapiens; identical to SEQ ID NO: 278

SEQ ID NO: 283 - DNA, 346 bp, Homo sapiens
caggtgcagctggtgcagtctggggctgaactgaggaagtctggggcctcagcgaaggtctcctgcacggccactggatacacctccaccgcctattatgtacactgggtgcgacaggcccctggacaaggtcttgggtggatgggatgtatcaatcctcagagtgatgacacaaagtatgcacagaaatttcaggggagggtcaccatgaccagggacacgtccaccaatacagcctacatggaactgagtggactgacatttgacgacacggccatgtattattgcctcactgcaatagatgggatcgtctactggggccagggacccctggtccaccgtttcc

SEQ ID NO: 284 - DNA, 403 bp, Homo sapiens
caggtgcagctggtgcagtctggggcagaggtgaagaagcctggggcctcagtgaaggtctcctgcgggacttctggatacaccttcaccaactactatatacattgggtgcggcaggcccctggacatgggcttgagtggatggcctggatcaaccctagcggtggtgccacaatctatgcagaggcttttgagggcagggtcaccgtaaccacggacacgtccatgaaaacagtctacatggagttggagagcctgacatctggcgacacggccatgtatttctgcgccagagatgcgactccgataactacggaatttgactactggggccagggaacactgatcaccgtctcctcacgcctccaccgaacggcccactccggtccttcccccgtcggcc

SEQ ID NO: 285 - DNA, 360 bp, Homo sapiens; identical to SEQ ID NO: 241

SEQ ID NO: 286 - DNA, 363 bp, Homo sapiens
caggtgcagctggtgcagtctggggctgaggtgaagaagcctggggcctcaatgagggtctcatgtcagacttcaggatacacgtttaactcctattatatacactggatgcgccaggtccctggacaaggccttgagtggatggggtggattaaccctaatagtggttacacaaactatacacagaaatttcagggaagggtcaccatgaccagggatacgtccattaacacagcctacctggagctcagtgccctgagatctgacgagacggccgtttattattgtgcgagagactttagcgacggttggccttactccttcgacttctggggccagggaactctagtcaccgtctcctca

SEQ ID NO: 287 - DNA, 360 bp, Homo sapiens; identical to SEQ ID NO: 241

SEQ ID NO: 288 - DNA, 363 bp, Homo sapiens; identical to SEQ ID NO: 286

SEQ ID NO: 289 - DNA, 403 bp, Homo sapiens
caggtgcagctggtgcagtctggggcagaggtgaagaagcctggggcctcagtgaaggtctcctgcgggacttctggatacaccttcaccaactactatatacattgggtgcggcaggcccctggacatgggcttgagtggatggcctggatcaaccctagcggtggtgccacaatctatgcagaggcttttgagggcagggtcaccgtaaccacggacacgtccatgaaaacagtctacatggagttggagagcctgacatctggcgacacggccatgtatttctgcgccagagatgcgactccgataactacggaatttgactactggggccagggaacactgatcaccgtctcctcacgcctccaccaacggcccatcggtccttccccctcggccaccc

SEQ ID NO: 290 - DNA, 360 bp, Homo sapiens; identical to SEQ ID NO: 241

SEQ ID NO: 291 - DNA, 363 bp, Homo sapiens
caggtgcagctggtgcagtctggggcagaggtgaagaagcctggggcctcagtgaaggtctcctgcgggacttctggatacaccttcaccaactactatatacattgggtgcggcaggcccctggacatgggcttgagtggatggcctggatcaaccctagcggtggtgccacaatctatgcagaggcttttgagggcagggtcaccgtaaccacggacacgtccatgaaaacagtctacatggagttggagagcctgacatctggcgacacggccatgtatttctgcgccagagatgcgactccgataactacggaattgactacgtggggaccagggaacactgatcaccgtctcctcacg

SEQ ID NO: 292 - DNA, 365 bp, Homo sapiens
caggtgcagctggtgcagtctggggctgaggtgaagaagcctggggcctcaatgagggtctcatgtcagacttcaggatacacgtttaactcctattatatacactggatgcgccaggtccctggacaaggccttgagtggatggggtggattaaccctaatagtggttacacaaactatacacagaaatttcagggaagggtcaccatgaccagggatacgtccattaacacagcctacctggagctcagtgccctgagatctgacgagacggccgtttattattgtgcgagagactttagcgacggttggccttactccttcgacttctggggtccagggaactctagtcaccgtctcctcag

SEQ ID NO: 293 - DNA, 402 bp, Homo sapiens
caggtgcagctggtgcagtctggggcagaggtgaagaagcctggggcctcagtgaaggtctcctgcgggacttctggatacaccttcaccaactactatatacattgggtgcggcaggcccctggacatgggcttgagtggatggcctggatcaaccctagcggtggtgccacaatctatgcagaggcttttgagggcagggtcaccgtaaccacggacacgtccatgaaaacagtctacatggagttggagagcctgacatctggcgacacggccatgtatttctgcgccagagatgcgactccgataactacggaatttgactactggggccagggaacactgatcaccgtctcctcacgcctccaccaacggcccactccggtccttcccccgtcggcc

SEQ ID NO: 294 - DNA, 360 bp, Homo sapiens; identical to SEQ ID NO: 241

SEQ ID NO: 295 - DNA, 365 bp, Homo sapiens
caggtgcagctggtgcagtctggggcagaggtgaagaagcctggggcctcagtgaaggtcccctgcgggacttctggatacaccttcaccaactactatatacattgggtgcggcaggcccctggacatgggcttgagtggatggcctggatcaaccctagcggtggtgccacaatctatgcagaggcttttgagggcagggtcaccgtaaccacggacacgtccatgaaaacagtctacatggagttggagagcctgacatctggcgacacggccatgtatttctgtgccagagatgcgactccgataactacggaatttgactactggggccagggaacactgatcaccgtctcctcacgcct

SEQ ID NO: 296 - DNA, 366 bp, Homo sapiens
caggtgcagctggtgcagtctggggcagaggtgaagaagcctggggcctcagtgaaggtctcctgcgggacttctggatacaccttcaccaactactatatacattgggtgcggcaggcccctggacatgggcttgagtggatggcctggatcaaccctagcggtggtgccacaatctatgcagaggcttttgagggcagggtcaccgtaaccacggacacgtccatgaaaacagtctacatggagttggagagcctgacatctggcgacacggccatgtatttctgcgccagagatgcgactccgataactacggaatttgactactggggccagggaacactgatcaccgtctcctcacgcccc

SEQ ID NO: 297 - DNA, 365 bp, Homo sapiens
caggtgcagctggtgcagtctggggcagaggtgaagaagcctggggcctcagtgaaggtctcctgcgggacttctggatacaccttcaccaactactatatacattgggtgcggcaggcccctggacatgggcttgagtggatggcctggatcaaccctagcggtggtgccacaatctatgcagaggcttttgagggcagggtcaccgtaaccacggacacgtccatgaaaaacagtctacatggagttggagagcctgacatctggcgacacggccatgtatttctgacgccagagatgcgactccgataactacggaatttgactacgtggggccagggaacactgatcaccgtctcctcacg

SEQ ID NO: 298 - DNA, 363 bp, Homo sapiens; identical to SEQ ID NO: 286

SEQ ID NO: 299 - DNA, 364 bp, Homo sapiens
caggtgcagctggtgcagtctggggcagaggtgaagaagcctggggcctcagtgaaggtctcctgcgggacttctggatacaccttcaccaactactatatacattgggtgcggcaggcccctggacatgggcttgagtggatggcctggatcaaccctagcggtggtgccacaatctatgcagaggcttttgagggcagggtcaccgtaaccacggacacgtccatgaaaacagtctacatggagttggagagcctgacatctggcgacacggccatgtatttctgcgccagagatgcgactccgataactacggaatttgactactggggccagggaacactgatcaccgtctcctcacgcc

SEQ ID NO: 300 - DNA, 373 bp, Homo sapiens
caggtgcagctggtgcagtctggggcagaggtgaagaagcctggggcctcagtgaaggtctcctgcgggacttctggatacaccttcaccaactactatatacattgggtgcggcaggcccctggacatgggcttgagtggatggcctggatcaaccctagcggtggtgccacaatctatgcagaggcttttgagggcagggtcaccgtaaccacggacacgtccatgaaaacagtctacatggagttggagagcctgacatctggcgacacggccatgtatttctgcgccagagatgcgactccgataactacggaatttgactactggggccagggaacactgatcaccgtctcctcacgcctccaccaac

SEQ ID NO: 301 - DNA, 417 bp, Homo sapiens
caggtgcagctggtgcagtctggggcagaggtgaagaagcctggggcctcagtgaaggtctcctgcgggacttctggatacaccttcaccaactactatatacattgggtgcggcaggcccctggacatgggcttgagtggatggcctggatcaaccctagcggtggtgccacaatctatgcagaggcttttgagggcagggtcaccgtaaccacggacacgtccatgaaaacagtctacatggagttggagagcctgacatctggcgacacggccatgtatttctgcgccagagatgcgactccgataactacggaatttgactactggggccagggaacactgatcaccgtctcctcacgcctccaccaacggcccatcggtccttccccctcggccaccctcctaccaacgacg

SEQ ID NO: 302 - DNA, 360 bp, Homo sapiens; identical to SEQ ID NO: 241

SEQ ID NO: 303 - DNA, 370 bp, Homo sapiens; identical to SEQ ID NO: 243

SEQ ID NO: 304 - DNA, 360 bp, Homo sapiens; identical to SEQ ID NO: 241

SEQ ID NO: 305 - DNA, 364 bp, Homo sapiens; identical to SEQ ID NO: 299

SEQ ID NO: 306 - DNA, 370 bp, Homo sapiens; identical to SEQ ID NO: 243

SEQ ID NO: 307 - DNA, 360 bp, Homo sapiens; identical to SEQ ID NO: 241

SEQ ID NO: 308 - DNA, 354 bp, Homo sapiens
caggtgcagctggtgcagtctggggcagaggtgaagaagcctggggcctcagtgaaggtctcctgcgggacttctggatacaccttcaccaactactatatacattgggtgcggcaggcccctggacatgggcttgagtggatggcctggatcaaccctagcggtggtgccacaatctatgcagaggcttttgagggcagggtcaccgtgaccacggacacgtccatgaaaacagtctacatggagttggagagcctgacatctggcgacacggccatgtatttctgcgccagagatgcgactccgataactacggaatttgactactggggccagggaacactgatcaccgtc

SEQ ID NO: 309 - DNA, 393 bp, Homo sapiens
caggtgcagctggtgcagtctggggcagaggtgaagaagcctggggcctcagtgaaggtctcctgcgggacttctggatacaccttcaccaactactatatacattgggtgcggcaggcccctggacatgggcttgagtggatggcctggatcaaccctagcggtggtgccacaatctatgcagaggcttttgagggcagggtcaccgtaaccacggacacgtccatgaaaacagtctacatggagttggagagcctgacatctggcgacacggccatgtatttctgcgccagagatgcgactccgataactacggaatttgactactggggccagggaacactgatcaccgtctcctcagcctccaccgaaggcccatccggtccttccccc

SEQ ID NO: 310 - DNA, 412 bp, Homo sapiens
caggtgcagctggtgcagtctggggcagaggtgaagaagcctggggcctcagtgaaggtctcctgcgggacttctggatacaccttcaccaactactatatacattgggtgcggcaggcccctggacatgggcttgagtggatggcctggatcaaccctagcggtggtgccacaatctatgcagaggcttttgagggcagggtcaccgtaaccacggacacgtccatgaaaacagtctacatggagttggagagcctgacatctggcgacacggccatgtatttctgcgccagagatgcgactccgataactacggaatttgactactggggccagggaacactgatcaccgtctcctcagcctccaccacggcccatcggtcttccccctcggcaccctcctccaacgacg

SEQ ID NO: 311 - DNA, 363 bp, Homo sapiens; identical to SEQ ID NO: 286

SEQ ID NO: 312 - DNA, 360 bp, Homo sapiens; identical to SEQ ID NO: 241

SEQ ID NO: 313 - DNA, 443 bp, Homo sapiens
caggtgcagctggtgcagtctggggcagaggtgaagaagcctggggcctcagtgaaggtctcctgcgggacttctggatacaccttcaccaactactatatacattgggtgcggcaggcccctggacatgggcttgagtggatggcctggatcaaccctagcggtggtgccacaatctatgcagaggcttttgagggcagggtcaccgtaaccacggacacgtccatgaaaacagtctacatggagttggagagcctgacatctggcgacacggccatgtatttctgcgccagagatgcgactccgataactacggaatttgactactggggccagggaacactgatcaccgtctcctcagcctccaccaacggcccatccggtccttccccctggccaccctcctcccaagacgccacctcgtcggggcacgacgcacgccc

SEQ ID NO: 314 - DNA, 363 bp, Homo sapiens
caggtgcagctggtgcagtctggggctgaggtgaagaagcctggggcctcaatgagggtctcatgccagacttcaggatacacgtttaactcctattatatacactggatgcgccaggtccctggacaaggccttgagtggatgggatggattagccctaatagtggttacacaaactatacacagaaatttcagggaagggtcaccatgaccagggatacgtccattaacacagcctacctggagctcagtgccctgagatctgacgagacggccgtttattattgtgcgagagactttagcgacggttggccttactccttcgacttctggggccagggaactctagtcaccgtctcctca

SEQ ID NO: 315 - DNA, 360 bp, Homo sapiens; identical to SEQ ID NO: 241

SEQ ID NO: 316 - DNA, 360 bp, Homo sapiens; identical to SEQ ID NO: 241

SEQ ID NO: 317 - DNA, 372 bp, Homo sapiens
caggtgcagctggtgcagtctggggctgaggtgaagaagcctggggcctcaatgagggtctcatgtcagacttcaggatacacgtttaactcctattatatacactggatgcgccaggtccctggacaaggccttgagtggatgggatggattaaccctaatagtggttacacaaactatacacagaaatttcagggaagggtcaccatgaccagggatacgtccattaacacagcctacctggagctcagtgccctgagatctgacgagacggccgtttattattgtgcgagagactttagcgacggttggccttactccttcgacttctggggccagggaactctagtcaccgtctcctcagcctccacc

SEQ ID NO: 318 - DNA, 380 bp, Homo sapiens; identical to SEQ ID NO: 265

SEQ ID NO: 319 - DNA, 452 bp, Homo sapiens
caggtgcagctggtgcagtctggggcagaggtgaagaagcctggggcctcagtgaaggtctcctgcgggacttctggatacaccttcaccaactactatatacattgggtgcggcaggcccctggacatgggcttgagtggatggcctggatcaaccctagcggtggtgccacaatctatgcagaggcttttgagggcagggtcaccgtaaccacggacacgtccatgaaaacagtctacatggagttggagagcctgacatctggcgacacggccatgtatttctgcgccagagatgcgactccgataactacggaatttgactactggggccagggaacactgatcaccgtctcctcacgcctccaccaacgggcccacgtccggtccttcccccgtcggccaccctcctccaacgacgccacctcgtcggggccacgacgcacgcccgt

SEQ ID NO: 320 - DNA, 370 bp, Homo sapiens
caggtgcagctggtgcagtctggggcagaggtgaagaagcctggggcctcagtgaaggtctcctgcgggacttctggatacaccttcaccaactactatatacattgggtgcggcaggcccctggacatgggcttgagtggatggcctggatcaaccctagcggtggtgccacaatctatgcagaggcttttgagggcagggtcaccgtaaccacggacacgtccatgaaaacagtctacatggagttggagagcctgacatctggcgacacggccatgtatttctgcgcagagatgcgactccgataactacggaatttgactacgtggggccagggaacactgatcaccgtctcctcacgcctccacc

SEQ ID NO: 321 - DNA, 423 bp, Homo sapiens
caggtgcagctggtgcagtctggggctgaggtgaagaagcctggggcctcaatgagggtctcatgtcagacttcaggatacacgtttaactcctattatatacactggatgcgccaggtccctggacaaggccttgagtggatggggtggattaaccctaatagtggttacacaaactatacacagaaatttcagggaagggtcaccatgaccagggatacgtccattaacacagcctacctggagctcagtgccctgagatctgacgagacggccgtttattattgtgcgagagactttagcgacggttggccttactccttcgacttctggggccagggaactctagtcaccgtctcctcagcctccaccaaggcccatcggtcttcccctggcacctcctccaagacgcacctctggggc

SEQ ID NO: 322 - DNA, 373 bp, Homo sapiens
caggtgcagctggtgcagtctggggctgaggtgaagaagcctggggcctcaatgagggtctcatgtcagacttcaggatacacgtttaactcctattatatacactggatgcgccaggtccctggacaaggccttgagtggatggggtggattaaccctaatagtggctacacaaactatacacagaaatttcagggaagggtcaccatgaccagggatacgtccattaacacagcctacctggagctcagtgccctgagatctgacgagacggccgtttattattgtgcgagagactttagcgacggttggccttactccttcgacttctggggaccagggaactctagtcaccgtctcctcagcctccacc

SEQ ID NO: 323 - DNA, 419 bp, Homo sapiens
caggtgcagctggtgcagtctggggctgaggtgaagaagcctggggcctcaatgagggtctcatgtcagacttcaggatacacgtttaactcctattatatacactggatgcgccaggtccctggacaaggccttgagtggatgggatggattaaccctaatagtggttacacaaactatacacagaaatttcagggaagggtcaccatgaccagggatacgtccattaacacagcctacctggagctcagtgccctgagatctgacgagacggccgtttattattgtgcgagagactttagcgacggttggccttactccttcgacttctggggccagggaactctagtcaccgtctcctcacgcctccaccaacggcccatccggtcttccccctcggccaccctcctccaacgacg

SEQ ID NO: 324 - DNA, 428 bp, Homo sapiens
caggtgcagctggtgcagtctggggcagaggtgaagaagcctggggcctcagtgaaggtctcctgcgggacttctggatacaccttcaccaactactatatacattgggtgcggcaggcccctggacatgggcttgagtggatggcctggatcaaccctagcggtggtgccacaatctatgcagaggcttttgagggcagggtcaccgtaaccacggacacgtccatgaaaacagtctacatggagttggagagcctgacatctggcgacacggccatgtatttctgcgccagagatgcgactccgataactacggaatttgactactggggccagggaacactgatcaccgtctcctcacgcctccaccaacgggcccatccggtccttccccctcggccaccctccctccaacgacgccacctcgt

SEQ ID NO: 325 - DNA, 406 bp, Homo sapiens
caggtgcagctggtgcagtctggggcagaggtgaagaagcctggggcctcagtgaaggtctcctgcgggacttctggatacaccttcaccaactactatatacattgggtgcggcaggcccctggacatgggcttgagtggatggcctggatcaaccctagcggtggtgccacaatctatgcagaggcttttgagggcagggtcaccgtaaccacggacacgtccatgaaaacagtctacatggagttggagagcctgacatctggcgacacggccatgtatttctgcgccagagatgcgactccgataactacggaatttgactactggggccagggaacactgatcaccgtctcctcagggagtgcactcccgcccctaacccttttccccctcgtcctcctct

SEQ ID NO: 326 - DNA, 360 bp, Homo sapiens; identical to SEQ ID NO: 241

SEQ ID NO: 327 - DNA, 367 bp, Homo sapiens
caggtgcagctggtgcagtctggggctgaggtgaagaagcctggggcctcaatgagggtctcatgtcagacttcaggatacacgtttaactcctattatatacactggatgcgccaggtccctggacaaggccttgagtggatggggtggattaaccctaatagtggttacacaaactatacacagaaatttcagggaagggtcaccatgaccagggatacgtccattaacacagcctacctggagctcagtgccctgagatctgacgagacggccgtttattattgtgcgagagactttagcgacggttggccttactccttcgacttctggggccagggaactctagtcaccgtctcctcacgcc

SEQ ID NO: 328 - DNA, 363 bp, Homo sapiens; identical to SEQ ID NO: 286

SEQ ID NO: 329 - DNA, 362 bp, Homo sapiens; identical to SEQ ID NO: 271

SEQ ID NO: 330 - DNA, 349 bp, Homo sapiens
caggtgcagctggtgcagtctggggcagaggtgaagaagcctggggcctcagtgaaggtctcctgcgggacttctggatacaccttcaccaactactatatacattgggtgcggcaggcccctggacatgggcttgagtggatggcctggatcaaccctagcggtggtgccacaatctatgcagaggcttttgagggcagggtcaccgtaaccacggacacgtccatgaaaacagtctacatggagttggagagcctgacatctggcgacacggccatgtatttctgcgccagagatgcgactccgataactacggaatttgactactggggccagggaacactgatca

SEQ ID NO: 331 - DNA, 370 bp, Homo sapiens; identical to SEQ ID NO: 243

SEQ ID NO: 332 - DNA, 360 bp, Homo sapiens; identical to SEQ ID NO: 241

SEQ ID NO: 333 - DNA, 356 bp, Homo sapiens
caggtgcagctggtgcagtctggggctgaggtgaagaagcctggggcctcaatgagggtctcatgtcagacttcaggatacacgtttaactcctattatatacactggatgcgccaggtccctggacaaggccttgagtggatgggatggattaaccctaatagtggttacacaaactatacacagaaatttcagggaagggtcaccatgaccagggatacgtccattaacacagcctacctggagctcagtgccctgagatctgacgagacggccgtttattattgtgcgagagactttagcgacggttggccttactccttcgacttctggggccagggaactctagtcaccgt

SEQ ID NO: 334 - DNA, 370 bp, Homo sapiens; identical to SEQ ID NO: 243

SEQ ID NO: 335 - DNA, 360 bp, Homo sapiens; identical to SEQ ID NO: 241

SEQ ID NO: 336 - DNA, 365 bp, Homo sapiens; identical to SEQ ID NO: 184

SEQ ID NO: 337 - DNA, 360 bp, Homo sapiens; identical to SEQ ID NO: 241

SEQ ID NO: 338 - DNA, 370 bp, Homo sapiens; identical to SEQ ID NO: 243

SEQ ID NO: 339 - DNA, 360 bp, Homo sapiens; identical to SEQ ID NO: 241

SEQ ID NO: 340 - DNA, 379 bp, Homo sapiens
caggtgcagctggtgcagtctggggcagaggtgaagaagcctggggcctcagtgaaggtctcctgcgggacttctggatacaccttcaccaactactatatacattgggtgcggcaggcccctggacatgggcttgagtggatggcctggatcaaccctagcggtggtgccacaatctatgcagaggcttttgagggcagggtcaccgtaaccacggacacgtccatgaaaacagtctacatggagttggagagcctgacatctggcgacacggccatgtatttctgcgccagagatgcgactccgataactacggaattcgactactggggccagggaacactgatcaccgtctcctcagcctccaccaacgggccca

SEQ ID NO: 341 - DNA, 364 bp, Homo sapiens
caggtgcagctggtgcagtctggggcagaggtgaagaagcctggggcctcagtgaaggtctcctgcgggacttctggatacaccttcaccaactactatatacattgggtgcggcaggcccctggacatgggcttgagtggatggcctggatcaaccctagcggtggtgccacaatctatgcagaggcttttgagggcagggtcaccgtaaccacggacacgtccatgaaaacagtctacatggagttggagagcctgacatctggcgacacggccatgtatttctgcgcagagatgcgactccgataactacggaatttgactacgtggggccagggaacactgatcaccgtctcctcacgcc

SEQ ID NO: 342 - DNA, 404 bp, Homo sapiens
caggtgcagctggtgcagtctggggcagaggtgaagaagcctggggcctcagtgaaggtctcctgcgggacttctggatacaccttcaccaactactatatacattgggtgcggcaggcccctggacatgggcttgagtggatggcctggatcaaccctagcggtggtgccacaatctatgcagaggcttttgagggcagggtcaccgtaaccacggacacgtccatgaaaacagtctacatggagttggagagcctgacatctggcgacacggccatgtatttctgcgccagagatgcgactccgataactacggaattcgactactggggccagggaacactgatcaccgtctcctcacgcctccaccaacgggcccactccggtccttcccccgtcggcca

SEQ ID NO: 343 - DNA, 371 bp, Homo sapiens
caggtgcagctggtgcagtctggggctgaggtgaagaagcctggggcctcaatgagggtctcatgtcagacttcaggatacacgtttaactcctattatatacactggatgcgccaggtccctggacaaggccttgagtggatggggtggattaaccctaatagtggttacacaaactatacacagaaatttcagggaagggtcaccatgaccagggatacgtccattaacacagcctacctggagctcagtgccctgagatctgacgagacggccgtttattattgtgcgagagactttagcgacggttggccttactccttcgacttctggggccagggaactcgtagtcaccgtctcctcacgcctcc

SEQ ID NO: 344 - DNA, 360 bp, Homo sapiens; identical to SEQ ID NO: 241

SEQ ID NO: 345 - DNA, 360 bp, Homo sapiens; identical to SEQ ID NO: 241

SEQ ID NO: 346 - DNA, 379 bp, Homo sapiens
caggtgcagctggtgcagtctggggctgaggtgaagaagcctggggcctcaatgagggtctcatgtcagacttcaggatacacgtttaactcctattatatacactggatgcgccaggtccctggacaaggccttgagtggatggggtggattaaccctaatagtggttacacaaactatacacagaaatttcagggaagggtcaccatgaccagggatacgtccattaacacagcctacctggagctcagtgccctgagatctgacgagacggccgtttattattgtgcgagagactttagcgacggttggccttactccttcgacttctggggccagggaactctagtcaccgtctcctcagcctccaccaggccca

SEQ ID NO: 347 - DNA, 370 bp, Homo sapiens; identical to SEQ ID NO: 243

SEQ ID NO: 348 - DNA, 363 bp, Homo sapiens; identical to SEQ ID NO: 286

SEQ ID NO: 349 - DNA, 355 bp, Homo sapiens
caggtgcagctggtgcagtctggggcagaggtgaagaagcctggggcctcagtgaaggtctcctgcgggacttctggatacaccttcaccaactactatatacattgggtgcggcaggcccctggacatgggcttgagtggatggcctggatcaaccctagcggtggtgccacaatctatgcagaggcttttgagggcagggtcaccgtaaccacggacacgtccatgaaaacagtctacatggagttggagagcctgacatctggcgacacggccatgtatttctgcgccagagatgcgactccgataactacggaatttgactactggggccagggaacactgatcaccgtct

SEQ ID NO: 350 - DNA, 360 bp, Homo sapiens; identical to SEQ ID NO: 241

SEQ ID NO: 351 - DNA, 416 bp, Homo sapiens
caggtgcagctggtgcagtctggggcagaggtgaagaagcctggggcctcagtgaaggtctcctgcgggacttctggatacaccttcaccaactactatatacattgggtgcggcaggcccctggacatgggcttgagtggatggcctggatcaaccctagcggtggtgccacaatctatgcagaggcttttgagggcagggtcaccgtaaccacggacacgtccatgaaaacagtctacatggagttggagagcctgacatctggcgacacggccatgtatttctgcgccagagatgcgactccgataactacggaatttgactactggggccagggaacactgatcaccgtctcctcagcctccaccaacggcccactcggtccttccccctcggccaccctcctccaacgacg

SEQ ID NO: 352 - DNA, 410 bp, Homo sapiens
caggtgcagctggtgcagtctggggcagaggtgaagaagcctggggcctcagtgaaggtctcctgcgggacttctggatacaccttcaccaactactatatacattgggtgcggcaggcccctggacatgggcttgagtggatggcctggatcaaccctagcggtggtgccacaatctatgcagaggcttttgagggcagggtcaccgtaaccacggacacgtccatgaaaacagtctacatggagttggagagcctgacatctggcgacacggccatgtatttctgcgccagagatgcgactccgataactacggaatttgactactggggccagggaacactgatcaccgtctcctcagcctccaccaacgggcccatccggtccttccccctggccgccctgcctcc

SEQ ID NO: 353 - DNA, 369 bp, Homo sapiens; identical to SEQ ID NO: 252

SEQ ID NO: 354 - DNA, 380 bp, Homo sapiens; identical to SEQ ID NO: 265

SEQ ID NO: 355 - DNA, 362 bp, Homo sapiens; identical to SEQ ID NO: 271

SEQ ID NO: 356 - DNA, 360 bp, Homo sapiens; identical to SEQ ID NO: 241

SEQ ID NO: 357 - DNA, 360 bp, Homo sapiens; identical to SEQ ID NO: 241

SEQ ID NO: 358 - DNA, 406 bp, Homo sapiens
caggtgcagctggtgcagtctggggcagaggtgaagaagcctggggcctcagtgaaggtctcctgcgggacttctggatacaccttcaccaactactatatacattgggtgcggcaggcccctggacatgggcttgagtggatggcctggatcaaccctagcggtggtgccacaatctatgcagaggcttttgagggcagggtcaccgtaaccacggacacgtccatgaaaacagtctacatggagttggagagcctgacatctggcgacacggccatgtatttctgcgccagagatgcgactccgataactacggaatttgactactggggccagggaacactgatcaccgtctcctcacgcctccaccgaaggcccatcggtccttccccctcggccaccctcc

SEQ ID NO: 359 - DNA, 364 bp, Homo sapiens
caggtgcagctggtgcagtctggggcagaggtgaagaagcctggggcctcagtgaaggtctcctgcgggacttctggatacaccttcaccaactactatatacattgggtgcggcaggcccctggacatgggcttgagtggatggcctggatcaaccctagcggtggtgccacaatctatgcagaggcttttgagggcagggtcaccgtaaccacggacacgtccatgaaaacagtctacatggagttggagagcctgacatctggcgacacggccatgtatttctgcgccagagatgcgactccgataactacggaatttgactactggggccagggaacactgatcaccgtctcctcagcct

SEQ ID NO: 360 - DNA, 360 bp, Homo sapiens; identical to SEQ ID NO: 241

SEQ ID NO: 361 - DNA, 360 bp, Homo sapiens; identical to SEQ ID NO: 241

SEQ ID NO: 362 - DNA, 370 bp, Homo sapiens; identical to SEQ ID NO: 243

SEQ ID NO: 363 - DNA, 403 bp, Homo sapiens
caggtgcagctggtgcagtctggggcagaggtgaagaagcctggggcctcagtgaaggtctcctgcgggacttctggatacaccttcaccaactactatatacattgggtgcggcaggcccctggacatgggcttgagtggatggcctggatcaaccctagcggtggtgccacaatctatgcagaggcttttgagggcagggtcaccgtaaccacggacacgtccatgaaaacagtctacatggagttggagagcctgacatctggcgacacggccatgtatttctgcgccagagatgcgactccgataactacggaatttgactactggggccagggaacactgatcaccgtctcctcacgcctccaccgaacggcccagtccggtccttcccccgtcggcc

SEQ ID NO: 364 - DNA, 365 bp, Homo sapiens; identical to SEQ ID NO: 184

SEQ ID NO: 365 - DNA, 400 bp, Homo sapiens
caggtgcagctggtgcagtctggggcagaggtgaagaagcctggggcctcagtgaaggtctcctgcgggacttctggatacaccttcaccaactactatatacattgggtgcggcaggcccctggacatgggcttgagtggatggcctggatcaaccctagcggtggtgccacaatctatgcagaggcttttgagggcagggtcaccgtaaccacggacacgtccatgaaaacagtctacatggagttggagagcctgacatctggcgacacggccatgtatttctgcgccagagatgcgactccgataactacggaatttgactactggggccagggaacactgatcaccgtctcctcagggatgcactcccgcccctaacccttttccccctcgtcct

SEQ ID NO: 366 - DNA, 373 bp, Homo sapiens; identical to SEQ ID NO: 300

SEQ ID NO: 367 - DNA, 366 bp, Homo sapiens
caggtgcagctggtgcagtctggggcagaggtgaagaagcctggggcctcagtgaaggtctcctgcgggacttctggatacaccttcaccaactactatatacattgggtgcggcaggcccctggacatgggcttgagtggatggcctggatcaaccctagcggtggtgccacaatctatgcagaggcttttgagggcagggtcaccgtaaccacggacacgtccatgaaaacagtctacatggagttggagagcctgacatctggcgacacggccatgtatttctgcgccagagatgcgactccgataactacggaattgactacgtggggaccagggaacactgatcaccgtctcctcacgcct

SEQ ID NO: 368 - DNA, 346 bp, Homo sapiens
caggtgcagctggtgcagtctggggcagaggtgaagaagcctggggcctcagtgaaggtctcctgcgggacttctggatacaccttcaccaactactatatacattgggtgcggcaggcccctggacatgggcttgagtggatggcctggatcaaccctagcggtggtgccacaatctatgcagaggcttttgagggcagggtcaccgtaaccacggacacgtccatgaaaacagtctacatggagttggagagcctgacatctggcgacacggccatgtatttctgcgccagagatgcgactccgataactacggaatttgactactggggccagggaacactga

SEQ ID NO: 369 - DNA, 365 bp, Homo sapiens; identical to SEQ ID NO: 184

SEQ ID NO: 370 - DNA, 382 bp, Homo sapiens
caggtgcagctggtgcagtctggggctgaggtgaagaagcctggggcctcaatgagggtctcatgtcagacttcaggatacacgtttaactcctattatatacactggatgcgccaggtccctggacaaggccttgagtggatgggatggattaaccctaatagtggttacacaaactatacacagaaatttcagggaagggtcaccatgaccagggatacgtccattaacacagcctatctggagctcagtgccctgagatctgacgagacggccgtttattattgtgcgagagactttagcgacggttggccttactccttcgacttctggggccagggaactctagtcaccgtctcctcagcctccaccaacgggccca

SEQ ID NO: 371 - DNA, 360 bp, Homo sapiens; identical to SEQ ID NO: 241

SEQ ID NO: 372 - DNA, 362 bp, Homo sapiens
caggtgcagctggtgcagtctggggcagaggtgaagaagcctggggcctcagtgaaggtctcctgcgggacttctggatacaccttcaccaactactatatacattgggtgcggcaggcccctggacatgggcttgagtggatggcctggatcaaccctagcggtggtgccacaatctatgcagaggcttttgagggcagggtcaccgtaaccacggacacgtccatgaaaacagtctacatggagttggagagcctgacatctggcgacacggccatgtatttctgcgccagagatgcgactccgataacctacggaattgactactggggccagggaacactgatcaccgtctcctcacg

SEQ ID NO: 373 - DNA, 380 bp, Homo sapiens; identical to SEQ ID NO: 265

SEQ ID NO: 374 - DNA, 348 bp, Homo sapiens
caggtgcagctggtgcagtctggggcagaggtgaagaagcctggggcctcagtgaaggtctcctgcgggacttctggatacaccttcaccaactactatatacattgggtgcggcaggcccctggacatgggcttgagtggatggcctggatcaaccctagcggtggtgccacaatctatgcagaggcttttgagggcagggtcaccgtaaccacggacacgtccatgaaaacagtctacatggagttggagagcctgacatctggcgacacggccatgtatttctgcgccagagatgcgactccgataactacggaatttgactactggggccagggaacactgatc

SEQ ID NO: 375 - DNA, 365 bp, Homo sapiens; identical to SEQ ID NO: 184

SEQ ID NO: 376 - DNA, 360 bp, Homo sapiens
caggtgcagctggtgcagtctggggcagaggtgaagaagcctggggcctcagtgaaggtctcctgcgggacttctggatacaccttcaccaactactatatacattgggtgcggcaggcccctggacatgggcttgagtggatggcctggatcaaccctagcggtggtgccacaatctatgcagaggcttttgagggcagggtcaccgtaaccacggacacgtccatgaaaaacagtctacatggagttggagagcctgacatctgcgacacggccatgtatttctgcgccagagatgcgactccgataactacggaatttgactactggggccagggaacactgatcaccgtctcctca

SEQ ID NO: 377 - DNA, 346 bp, Homo sapiens; identical to SEQ ID NO: 368

SEQ ID NO: 378 - DNA, 405 bp, Homo sapiens
caggtgcagctggtgcagtctggggcagaggtgaagaagcctggggcctcagtgaaggtctcctgcgggacttctggatacaccttcaccaactactatatacattgggtgcggcaggcccctggacatgggcttgagtggatggcctggatcaaccctagcggtggtgccacaatctatgcagaggcttttgagggcagggtcaccgtaaccacggacacgtccatgaaaacagtctacatggagttggagagcctgacatctggcgacacggccatgtatttctgcgccagagatgcgactccgataactacggaatttgactactggggccagggaacactgatcaccgtctcctcagcctccaccaacggcccatccggtccttcccccgtcggccaccct

SEQ ID NO: 379 - DNA, 415 bp, Homo sapiens
caggtgcagctggtgcagtctggggcagaggtgaagaagcctggggcctcagtgaaggtctcctgcgggacttctggatacaccttcaccaactactatatacattgggtgcggcaggcccctggacatgggcttgagtggatggcctggatcaaccctagcggtggtgccacaatctatgcagaggcttttgagggcagggtcaccgtaaccacggacacgtccatgaaaacagtctacatggagttggagagcctgacatctggcgacacggccatgtatttctgcgccagagatgcgactccgataactacggaatttgactactggggccagggaacactgatcaccgtctcctcacgcctccaccaaggcccatcggtccttccccctcggccaccctcctccaacgacg

SEQ ID NO: 380 - DNA, 360 bp, Homo sapiens; identical to SEQ ID NO: 241

SEQ ID NO: 381 - DNA, 363 bp, Homo sapiens; identical to SEQ ID NO: 286

SEQ ID NO: 382 - DNA, 367 bp, Homo sapiens; identical to SEQ ID NO: 278

SEQ ID NO: 383 - DNA, 362 bp, Homo sapiens; identical to SEQ ID NO: 271

SEQ ID NO: 384 - DNA, 414 bp, Homo sapiens
caggtgcagctggtgcagtctggggctgaggtgaagaagcctggggcctcaatgagggtctcatgtcagacttcaggatacacgtttaactcctattatatacactggatgcgccaggtccctggacaaggccttgagtggatggggtggattaaccctaatagtggttacacaaactatacacagaaatttcagggaagggtcaccatgaccagggatacgtccattaacacagcctacctggagctcagtgccctgagatctgacgagacggccgtttgttattgtgcgagagactttagcgacggttggccttactccttcgacttctggggccagggaactctagccaccgtctcctcagcctccaccaaggcccatcggtcttcccctggccaccctcctccaacgacg

SEQ ID NO: 385 - DNA, 363 bp, Homo sapiens; identical to SEQ ID NO: 201

SEQ ID NO: 386 - DNA, 362 bp, Homo sapiens; identical to SEQ ID NO: 271

SEQ ID NO: 387 - DNA, 360 bp, Homo sapiens; identical to SEQ ID NO: 241

SEQ ID NO: 388 - DNA, 452 bp, Homo sapiens
caggtgcagctggtgcagtctggggcagaggtgaagaagcctggggcctcagtgaaggtctcctgcgggacttctggatacaccttcaccaactactatatacattgggtgcggcaggcccctggacatgggcttgagtggatggcctggatcaaccctagcggtggtgccacaatctatgcagaggcttttgagggcagggtcaccgtaaccacggacacgtccatgaaaacagtctacatggagttggagagcctgacatctggcgacacggccatgtatttctgcgccagagatgcgactccgataactacggaatttgactactggggccagggaacactgatcaccgtctcctcagcctccaccaagggcccatcggtcttccccctggccaccctcctccaacgacgcacctctgggggcacagcagccctgggctgcctggtcaa

SEQ ID NO: 389 - DNA, 452 bp, Homo sapiens
caggtgcagctggtgcagtctggggctgaggtgaagaagcctggggcctcaatgagggtctcatgtcagacttcaggatacacgtttaactcctattatatacactggatgcgccaggtccctggacaaggccttgagtggatggggtggattaaccctaatagtggttacacaaactatacacagaaatttcagggaagggtcaccatgaccagggatacgtccattaacacagcctacctggagctcagtgccctgagatccgacgagacggccgtttattattgtgcgagagactttagcgacggttggccttactccttcgacttctggggccagggaactctagtcaccgtctcctcagcctccaccaagggcccatcggtcttccccctggccaccctcctccaacgacgcacctctggggcacagcggccctgggctgcctggtc

SEQ ID NO: 390 - DNA, 360 bp, Homo sapiens; identical to SEQ ID NO: 241

SEQ ID NO: 391 - DNA, 372 bp, Homo sapiens
caggtgcagctggtgcagtctggggcagaggtgaagaagcctggggcctcagtgaaggtctcctgcgggacttctggatacaccttcaccaactactatatacattgggtgcggcaggcccctggacatgggcttgagtggatggcctggatcaaccctagcggtggtgccacaatctatgcagaggcttttgagggcagggtcaccgtaaccacggacacgtccatgaaaacagtctacatggagttggagagcctgacatctggcgacacggccatgtatttctgcgccagagatgcgactccgataactacggaatttgactactggggccagggaacactgatcaccgtctcctcacgcctccaccaa

SEQ ID NO: 392 - DNA, 362 bp, Homo sapiens; identical to SEQ ID NO: 271

SEQ ID NO: 393 - DNA, 376 bp, Homo sapiens
caggtgcagctggtgcagtctggggcagaggtgaagaagcctggggcctcagtgaaggtctcctgcgggacttctggatacaccttcaccaactactatatacattgggtgcggcaggcccctggacatgggcttgagtggatggcctggatcaaccctagcggtggtgccacaatctatgcagaggcttttgagggcagggtcaccgtaaccacggacacgtccatgaaaacagtctacatggagttggagagcctgacatctggcgacacggccatgtatttctgcgccagagatgcgactccgataactacggaatttgactactggggccagggaacactgatcaccgtctcctcagcctccaccaaggccc

SEQ ID NO: 394 - DNA, 362 bp, Homo sapiens; identical to SEQ ID NO: 271

SEQ ID NO: 395 - DNA, 344 bp, Homo sapiens
caggtgcagctggtgcagtctggggcagaggtgaagaagcctggggcctcagtgaaggtctcctgcgggacttctggatacaccttcaccaactactatatacattgggtgcggcaggcccctggacatgggcttgagtggatggcctggatcaaccctagcggtggtgccacaatctatgcagaggcttttgagggcagggtcaccgtaaccacggacacgtccatgaaaaccagtctacatggagttggagagcctgacatctggcgacacggccatgtatttctgcgccagagatgcgactccgaataactacggaatttgactacgtggggccagggaac

SEQ ID NO: 396 - DNA, 346 bp, Homo sapiens; identical to SEQ ID NO: 368

SEQ ID NO: 397 - DNA, 386 bp, Homo sapiens
caggtgcagctggtgcagtctggggctgaagtgaagaagcctggggcctcagtgagggcctcctgcagggcttctggatacagtctcagcgactatgggatgcactgggtgcgacaggcccctggacaagggcttgagtggatgggatggatcaaacaaaacagtggtggcgcaacctatgcacagaaatttcaaggcagagtcatcatgagtagggacacgtccatcactacagacttcatagaactgagtagcctgacacttgacgacacggccgtatactattgtgcgagagcccagaggccagtggctgacgcacttgaacttgactattggggccgagggaacactggtcaccgtctcgtcagcctccaccaacgggccca

SEQ ID NO: 398 - DNA, 370 bp, Homo sapiens; identical to SEQ ID NO: 243

SEQ ID NO: 399 - DNA, 378 bp, Homo sapiens
caggtgcagctggtgcagtctggggcagaggtgaagaagcctggggcctcagtgaaggtctcctgcgggacttctggatacaccttcaccaactactatatacattgggtgcggcaggcccctggacatgggcttgagtggatggcctggatcaaccctagcggtggtgccacaatctatgcagaggcttttgagggcagggtcaccgtaaccacggacacgtccatgaaaacagtctacatggagttggagagcctgacatctggcgacacggccatgtatttctgcgccagagatgcgactccgataactacggaatttgactactggggccagggaacactgatcaccgtctcctcacgcctccaccaacggccc

SEQ ID NO: 400 - DNA, 418 bp, Homo sapiens
caggtgcagctggtgcagtctggggcagaggtgaagaagcctggggcctcagtgaaggtctcctgcgggacttctggatacaccttcaccaactactatatacattgggtgcggcaggcccctggacatgggcttgagtggatggcctggatcaaccctagcggtggtgccacaatctatgcagaggcttttgagggcagggtcaccgtaaccacggacacgtccatgaaaacagtctacatggagttggagagcctgacatctggcgacacggccatgtatttctgcgccagagatgcgactccgataactacggaatttgactactggggccagggaacactgatcaccgtctcctcagcctccaccaacgggcccatccggtcttccccctcggccaccctcctccaacgacgcc

SEQ ID NO: 401 - DNA, 361 bp, Homo sapiens
caggtgcagctggtgcagtctggggcagaggtgaagaagcctggggcctcagtgaaggtctcctgcgggacttctggatacaccttcaccaactactatatacattgggtgcggcaggcccctggacatgggcttgagtggatggcctggatcaaccctagcggtggtgccacaatctatgcagaggcttttgagggcagggtcaccgtaaccacggacacgtccatgaaaacagtctacatggagttggagagcctgacatctggcgacacggccatgtatttctgcgccagagatgcgactccgataactacggaatttgactactggggccagggaacactgatcaccgtctcctcag

SEQ ID NO: 402 - DNA, 365 bp, Homo sapiens; identical to SEQ ID NO: 184

SEQ ID NO: 403 - DNA, 370 bp, Homo sapiens; identical to SEQ ID NO: 243

SEQ ID NO: 404 - DNA, 363 bp, Homo sapiens; identical to SEQ ID NO: 286

SEQ ID NO: 405 - DNA, 360 bp, Homo sapiens
caggtgcagctggtgcagtctggggcagaggtgaagaagcctggggcctcagtgaaggtctcctgcgggacttctggatacaccttcaccaactactatatacattgggtgcggcaggcccctggacatgggcttgagtggatggcctggatcaaccctagcggtggtgtcacaatctatgcagaggcttttgagggcagggtcaccgtaaccacggacacgtccatgaaaacagtctacatggagttggagagcctgacatctggcgacacggccatgtatttctgcgccagagatgcgactccgataactacggaatttgactactggggccagggaacactgatcaccgtctcctca

SEQ ID NO: 406 - DNA, 426 bp, Homo sapiens
caggtgcagctggtgcagtctggggctgaggtgaagaagcctggggcctcaatgagggtctcatgtcagacttcaggatacacgtttaactcctattatatacactggatgcgccaggtccctggacaaggccttgagtggatgggatggattaaccctaatagtggttacacaaactatacacagaaatttcagggaagggtcaccatgaccagggatacgtccattaacacagcctacctggagctcagtgccctgagatctgacgagacggccgtttattattgtgcgagagactttagcgacggttggccttactccttcgacttctggggccagggaactctagtcaccgtctcctcagcctccaccaaggcccatcggtcttcccctggcaccctcctccaagacgcacctctggggcac

SEQ ID NO: 407 - DNA, 360 bp, Homo sapiens; identical to SEQ ID NO: 241

SEQ ID NO: 408 - DNA, 370 bp, Homo sapiens; identical to SEQ ID NO: 243

SEQ ID NO: 409 - DNA, 370 bp, Homo sapiens; identical to SEQ ID NO: 243

SEQ ID NO: 410 - DNA, 360 bp, Homo sapiens; identical to SEQ ID NO: 241

SEQ ID NO: 411 - DNA, 414 bp, Homo sapiens
caggtgcagctggtgcagtctggggctgaggtgaagaagcctggggcctcaatgagggtctcatgtcagacttcaggatacacgtttaactcctattatatacactggatgcgccaggtccctggacaaggccttgagtggatggggtggattaaccctaatagtggttacacaaactatacacagaaatttcagggaagggtcaccatgaccagggatacgtccattaacacagcctacctggagctcagtgccctgagatctgacgagacggccgtttattattgtgcgagagactttagcgacggttggccttactccttcgacttctggggccagggaactctagtcaccgtctcctcagcctccaccaagggcccatccggtcttccccctggccaccctcctccaacg

SEQ ID NO: 412 - DNA, 360 bp, Homo sapiens; identical to SEQ ID NO: 241

SEQ ID NO: 413 - DNA, 367 bp, Homo sapiens
caggtgcagctggtgcagtctggggctgaggtgaagaagcctggggcctcaatgagggtctcatgtcagacttcaggatacacgtttaactcctattatatacactggatgcgccaggtccctggacaaggccttgagtggatggggtggattaaccctaatagtggttacacaaactatacacagaaatttcagggaagggtcaccatgaccagggatacgtccattaacacagcctacctggagctcagtgccctgagatctgacgagacggccgtttattattgtgcgagagactttagcgacggttggccttactccttcgacttctggggccagggaactctagtcaccgtctcctcagcct

SEQ ID NO: 414 - DNA, 346 bp, Homo sapiens
caggtgcagctggtgcagtctggggctgaactgaggaagtctggggcctcagcgaaggtctcctgcacggccactggatacaccttcaccgcctattatgtacactgggtgcgacaggcccctggacaaggtcttgggtggatgggatgtatcaatcctcagagtgatgacacaaagtatgcacagaaatttcaggggagggtcaccatgaccagggacacgtccaccaatacagcctacatggaactgagtggactgacatttgacgacacggccatgtattattgcctcactgcaatagatgggatcgtctactggggccagggacccctggtccaccgtttcc

SEQ ID NO: 415 - DNA, 362 bp, Homo sapiens
caggtgcagctggtgcagtctggggctgaggtgaagaagcctggggcctcaatgagggtctcatgtcagacttcaggatacacgtttaactcctattatatacactggatgcgccaggtccctggacaaggccttgagtggatgggatggattaaccctaatagtggttacacaaactatacacagaaatttcagggaagggtcaccatgaccagggatacgtccattaacacagcctacctggagctcagtgccctgagatctgacgagacggccgtttattattgtgcgagagactttagcgacggttggccttactccttcgacttctggggccagggaactctagtcaccgtctcctc

SEQ ID NO: 416 - DNA, 363 bp, Homo sapiens; identical to SEQ ID NO: 201

SEQ ID NO: 417 - DNA, 374 bp, Homo sapiens; identical to SEQ ID NO: 261

SEQ ID NO: 418 - DNA, 415 bp, Homo sapiens
caggtgcagctggtgcagtctggggctgaggtgaagaagcctggggcctcaatgagggtctcatgtcagacttcaggatacacgtttaactcctattatatacactggatgcgccaggtccctggacaaggccttgagtggatgggatggattaaccctaatagtggttacacaaactatacacagaaatttcagggaagggtcaccatgaccagggatacgtccattaacacagcctacctggagctcagtgccctgagatctgacgagacggccgtttattattgtgcgagagactttagcgacggttggccttactccttcgacttctggggccagggaactctagtcaccgtctcctcagcctccaccaaggcccatcggtcttccccctggccaccctcctccaacgacg

SEQ ID NO: 419 - DNA, 363 bp, Homo sapiens; identical to SEQ ID NO: 201

SEQ ID NO: 420 - DNA, 364 bp, Homo sapiens
caggtgcagctggtgcagtctggggctgaggtgaagaagcctggggcctcagtgaaggtctcctgcgggacttctggatacaccttcaccaactactatatacattgggtgcggcaggcccctggacatgggcttgagtggatggcctggatcaaccctagcggtggtgccacaatctatgcagaggcttttgagggcagggtcaccgtaaccacggacacgtccatgaaaacagtctacatggagttggagagcctgacatctggcgacacggccatgtatttctgcgccagagatgcgactccgataactacggaatttgactactggggccagggaacactgatcaccgtctcctcagcct

SEQ ID NO: 421 - DNA, 380 bp, Homo sapiens
caggtgcagctggtgcagtctggggctgaggtaaagaagcctggggcctcggtgaaggtctcctgcaaggcttctggatacacgttcaccgactactttgtacactgggtgcgacaggcccctggacaaaattttgagtggatgggatggaccaacgtcaacactggtggcacaaagtatgcaccaaagttccaggacagagtcacctttaccacggacgaatccaagactacagcctacatggaactgagaagcctgagatctgaggacacggccgtctattactgtgcgagaaataccggcgcagtggctacctctttgtacagtttgggcgtctggggccaagggaccacggtcgccgtctcctcagcctccaccaa

SEQ ID NO: 422 - DNA, 459 bp, Homo sapiens
caggtgcagctggtgcagtctggggctgaggtgaagaagcctggggcctcaatgagggtctcatgtcagacttcaggatacacgtttaactcctattatatacactggatgcgccaggtccctggacaaggccttgagtggatggggtggattaaccctaatagtggttacacaaactatacacagaaatttcagggaagggtcaccatgaccagggatacgtccattaacacagcctacctggagctcagtgccctgagatctgacgagacggccgtttattattgtgcgagagactttagcgacggttggccttactccttcgacttctggggccagggaactctagtcaccgtctcctcagcctccaccaagggcccatcggtcttccccctggcaccctcctccaagagcacctctggggcacacgcggccctgggctgcctggtcaaggactac

SEQ ID NO: 423 - DNA, 374 bp, Homo sapiens; identical to SEQ ID NO: 261

SEQ ID NO: 424 - DNA, 348 bp, Homo sapiens
caggtgcagctggtgcagtctgaggctgaagtgaagaaacctggggcctcaatgaaggtctcctgtaaggcttctggatatagtttcaccgactattatatttattgggtgcgacaggtccccggacaaggactcgagtggatgggatggatcaaccctaatagtggtggcacaaattatgcacagaggtttcaggacaaggtctccatgaccagggacacgtccatcagcacagcctacatggaactgagaagactgatatctgacgacacggctatctatttttgtctcactgcattagatggtgtcgcgtactggggccagggaacgctggtcaccgtctcctca

SEQ ID NO: 425 - DNA, 362 bp, Homo sapiens; identical to SEQ ID NO: 256

SEQ ID NO: 426 - DNA, 363 bp, Homo sapiens
caggtgcagctggtgcagtctggggctgaggtgaagaagcctggggcctcaatgagggtctcatgtcagacttcgggatacacgtttaactcctattatatacactggatgcgccaggtccctggacaaggccttgagtggatggggtggattaaccctaatagtggttacacaaactatacacagaaatttcagggaagggtcaccatgaccagggatacgtccattaacacagcctacctggagctcagtgccctgagatctgacgagacggccgtttattattgtgcgagagactttagcgacggttgccttactccttcgacttcgtggggccagggaactctagtcaccgtctcctca

SEQ ID NO: 427 - DNA, 374 bp, Homo sapiens; identical to SEQ ID NO: 261

SEQ ID NO: 428 - DNA, 459 bp, Homo sapiens
caggtgcagctggtgcagtctggggctgaggtgaagaagcctgggtcctcggtgaaggtctcctgcaaggcttctggaggcaccttcagcgactacggtgttcattgggtgcgacaggcccctggacaaggccttgagtggatggggtggatcaatcatttcagtggtggcgccacatacgcagaggtatttcagggccgggtcgccatgaccagggacacgtccatcaacacagccttcatggaactgagaagtctgaaatttgacgacacggccttatattactgtgcgagagcccagaggccagtggctgacgcccttgagctcgacttgtggggccagggaacgctggtcaccgtctcgtcagcctccaccaagggcccatcggtcttccccctggccaccctcctccaggacgcacctccgagagcacagcggccctgggctgcctggtcaagg

SEQ ID NO: 429 - DNA, 363 bp, Homo sapiens
caggtgcagctggtgcagtctggggctgaggtgaagaagcctggggcctcaatgagggtctcatgtcagacttcaggatacacgtttaactcctattatatacactggatgcgccaggtccctggacaaggccttgagtggatggggtggattaaccctaatagtggttacacaaactatacacagaaatttcagggaagggtcaccatgaccagggatacgtccattaacacagcctacctggagctcagtgccctgagatctgacgagacggccgtttattattgtgcgagagactttagcgacggttggccttactccttcgacttctggggccagggaactcttgtcaccgtctcctca

SEQ ID NO: 430 - DNA, 433 bp, Homo sapiens
caggtgcagctggtgcagtctggggctgaggtgaagaagcctggggcctcagtgaaggtctcctgcgggacttctggatacaccttcaccaactactatatacattgggtgcggcaggcccctggacatgggcttgagtggatggcctggatcaaccctagcggtggtgccacaatctatgcagaggcttttgagggcagggtcaccgtaaccacggacacgtccatgaaaacagtctacatggagttggagagcctgacatctggcgacacggccatgtatttctgcgccagagatgcgactccgataactacggaatttgactactggggccagggaacactgatcaccgtctcctcacgcctccaccaacggcccactccggtccttccccctcggccaccctcctcccaacgacgccacctcgtcgggg

SEQ ID NO: 431 - DNA, 425 bp, Homo sapiens
caggtgcagctggtgcagtctggggctgaggtgaagaagcctggggcctcaatgagggtctcatgtcagacttcaggatacacgtttaactcctattatatacactggatgcgccaggtccctggacaaggccttgagtggatggggtggattaaccctaatagtggttacacaaactatacacagaaatttcagggaagggtcaccatgaccagggatacgtccattaacacagcctacctggagctcagtgccctgagatctgacgagacggccgtttattattgtgcgagagactttagcgacggttggccttactccttcgacttctggggccagggaactctagtcaccgtctcctcagcctccaccaggccatcggtcttcccctggcaccctcctccaagacgcacctctcggggcac

SEQ ID NO: 432 - DNA, 363 bp, Homo sapiens; identical to SEQ ID NO: 286

SEQ ID NO: 433 - DNA, 369 bp, Homo sapiens
caggtgcagctggtgcagtctggggctgaggtgaagaagcctggggcctcaatgagggtctcatgtcagacttcaggatacacgtttaactcctattatatacactggatgcgccaggtccctggacaaggccttgagtggatgggatggattaaccctaatagtggttacacaaactatacacagaaatttcagggaagggtcaccatgaccagggatacgtccattaacacagcctacctggagctcagtgccctgagatctgacgagacggccgtttattattgtgcgagagactttagcgacggttggccttactccttcgacttctggggccagggaactctagtcaccgtctcctcagcctcc

SEQ ID NO: 434 - DNA, 382 bp, Homo sapiens
caggtgcagctggtgcagtctggggctgaggtgaagaagcctggggcctcaatgagggtctcatgtcagacttcaggatacacgtttaactcctattatatacactggatgcgccaggtccctggacaaggccttgagtggatggggtggattaaccctaatagtggttacacaaactatacacagaaatttcagggaagggtcaccatgaccagggatacgtccattaacacagcctacctggagctcagtgccctgagatctgacgagacggccgtttattattgtgcgagagactttagcgacggttggccttactccttcgacttctggggccagggaactctagtcaccgtctcctcagcctccaccaacgggccca

SEQ ID NO: 435 - DNA, 380 bp, Homo sapiens
caggtgcagctggtgcagtctggggctgaggtgaagaagcctggggcctcagtgaaggtctcctgcgggacttctggatacaccttcaccaactactatatacattgggtgcggcaggcccctggacatgggcttgagtggatggcctggatcaaccctagcggtggtgccacaatctatgcagaggcttttgagggcagggtcaccgtaaccacggacacgtccatgaaaacagtctacatggagttggagagcctgacatctggcgacacggccatgtatttctgcgccagagatgcgactccgataactacggaatttgactactggggccagggaacactgatcaccgtctcctcacgcctccaccgaacggccca

SEQ ID NO: 436 - DNA, 416 bp, Homo sapiens
caggtgcagctggtgcagtctggggctgaggtgaagaagcctggggcctcaatgagggtctcatgtcagacttcaggatacacgtttaactcctattatatacactggatgcgccaggtccctggacaaggccttgagtggatggggtggattaaccctaatagtggttacacaaactatacacagaaatttcagggaagggtcaccatgaccagggatacgtccattaacacagcctacctggagctcagtgccctgagatctgacgagacggccgtttattattgtgcgagagactttagcgacggttggccttactccttcgacttctggggccagggaactctagtcaccgtctcctcagcctccaccaacggcccatcggtcttccccctggccaccctcctccaacgacg

SEQ ID NO: 437 - DNA, 375 bp, Homo sapiens
caggtgcagctggtgcagtctggggctgaggtgaagaagcctggggcctcagtgaaggtctcctgtaagacttccggatacaccttcaccagttacgatgttaattgggtgcgacaggcccctggacaacgtcttgagtggataggatggttcaatcctaacactggtggcgcacactatggactggactatcagggcagagtgacgatgaccggggacacgtccatcaccacagtctacatggagttgaccagactggcatccgacgacacggccatttattattgtgcgagagagggactttgtagaactactagctgccaatttgacttctggggccagggaacgctggtcaccgtcttctcagcctccacc

SEQ ID NO: 438 - DNA, 364 bp, Homo sapiens; identical to SEQ ID NO: 217

SEQ ID NO: 439 - DNA, 382 bp, Homo sapiens; identical to SEQ ID NO: 434

SEQ ID NO: 440 - DNA, 364 bp, Homo sapiens; identical to SEQ ID NO: 217

SEQ ID NO: 441 - DNA, 428 bp, Homo sapiens
caggtgcagctggtgcagtctggggctgaggtgaagaagcctggggcctcaatgagggtctcatgtcagacttcaggatacacgtttaactcctattatatacactggatgcgccaggtccctggacaaggccttgagtggatggggtggattaaccctaatagtggttacacaaactatacacagaaatttcagggaagggtcaccatgaccagggatacgtccattaacacagcctacctggagctcagtgccctgagatctgacgagacggccgtttattattgtgcgagagactttagcgacggttggccttactccttcgacttctggggccagggaactctagtcaccgtctcctcagcctccaccaaggcccatcggtcttccccctggccaccctcctccaagacgcacctctggggcac

SEQ ID NO: 442 - DNA, 363 bp, Homo sapiens; identical to SEQ ID NO: 286

SEQ ID NO: 443 - DNA, 372 bp, Homo sapiens; identical to SEQ ID NO: 268

SEQ ID NO: 444 - DNA, 377 bp, Homo sapiens
caggtgcagctggtgcagtctggggctgaggtgaagaagcctggggcctcagtgaaggtctcctgcgggacttctggatacaccttcaccaactactatatacattgggtgcggcaggcccctggacatgggcttgagtggatggcctggatcaaccctagcggtggtgccacaatctatgcagaggcttttgagggcagggtcaccgtaaccacggacacgtccatgaaaacagtctacatggagttggagagcctgacatctggcgacacggccatgtatttctgcgccagagatgcgactccgataactacggaatttgactactggggccagggaacactgatcaccgtctcctcagcctccaccaaggccca

SEQ ID NO: 445 - DNA, 369 bp, Homo sapiens
caggtgcagctggtgcagtctggggctgaggtaaagaagcctggggcctcggtgaaggtctcctgcaaggcttctggatacacgttcaccgactactttgtacactgggtgcgacaggcccctggacaaaattttgagtggatgggatggaccaacgtcaacactggtggcacaaagtatgcaccaaagttccaggacagagtcacctttaccacggacgaatccaagactacagcctacatggaactgagaagcctgagatctgaggacacggccgtctattactgtgcgagaaataccggcgcagtggctacctctttgtacagtttgggcgtctggggccaagggaccacggtcgccgtctcctca

SEQ ID NO: 446 - DNA, 362 bp, Homo sapiens; identical to SEQ ID NO: 415

SEQ ID NO: 447 - DNA, 364 bp, Homo sapiens
caggtgcagctggtgcagtctggggctgaggtgaagaagcctggggcctcaatgagggtctcatgtcagacttcaggatacacgtttaactcctattatatacactggatgcgccaggtccctggacaaggccttgagtggatggggtggattaaccctaatagtggttacacaaactatacacagaaatttcagggaagggtcaccatgaccagggatacgtccattaacacagcctacctggagctcagtgccctgagatctgacgagacggccgtttattattgtgcgagagactttagcgacggttggccttactccttcgacttctggggccagggaactctagtcaccgtctcctcag

SEQ ID NO: 448 - DNA, 416 bp, Homo sapiens
caggtgcagctggtgcagtctggggcagaggtgaagaagcctggggcctcagtgaaggtctcctgcgggacttctggatacaccttcaccaactactatatacattgggtgcggcaggcccctggacatgggcttgagtggatggcctggatcaaccctagcggtggtgccacaatctatgcagaggcttttgagggcagggtcaccgtaaccacggacacgtccatgaaaacagtctacatggagttggagagcctgacatctggcgacacggccgtgtatttctgcgccagagatgcgactccgataactacggaatttgactactggggccagggaacactgatcaccgtctcctcacgcctccaccaacggcccatcggtccttccccctcggccaccctcctccaacgacg

SEQ ID NO: 449 - DNA, 372 bp, Homo sapiens; identical to SEQ ID NO: 268

SEQ ID NO: 450 - DNA, 360 bp, Homo sapiens
caggtgcagctggtgcagtctggggcagaggtgaagaagcctggggcctcagtgaaggtctcctgcgggacttctggatacaccttcaccaactactatatacattgggtgcggcaggcccctggacatgggcttgagtggatggcctggatcaaccctagcggtggtgccacaatctatgcagaggcttttgagggcagggtcaccgtaaccacggacacgtccatgaaaacagtctacatggagttggagagcctgacatctggcgacacggccgtgtatttctgcgccagagatgcgactccgataactacggaatttgactactggggccagggaacactgatcaccgtctcctca

SEQ ID NO: 451 - DNA, 382 bp, Homo sapiens; identical to SEQ ID NO: 434

SEQ ID NO: 452 - DNA, 359 bp, Homo sapiens
caggtgcagctggtgcagtctggggctgaggtgaagacgcctggggcctcagtgaaagtctcctgcaggacttcaggatacaccttcaccgcttactacatacactgggtgcgacaggccctcggacacgggcttgagtgggtggggtggatcaaccccagtggaggtgccacaatctatgcacagaagtttgagggcagggtcaccttgaccagcgacacgtccattagtacagcctatttggagttgagcaacctgagacctgacgacacggccacatattattgtgtaagagatgcgactccggtgacaacggaattcgacttctggggccagggagcgctggtcaccgtctcctc

SEQ ID NO: 453 - DNA, 375 bp, Homo sapiens
caggtgcagctggtgcagtctgggcctgaagtgaagaagcctggggcctcactgaaggtctcctgtaaggcctccgaatacaccttcatcgattattatattcactgggtgcgacaagtccctggacaacggcttgagtggatgggttggatcaaccctaagacaactggcgcactctatgcagacaactttcagggtagggtcaccatgaccagtgacacgtccatcaacacagtctacatggaagtgaccaggctgacatctgacgacacggccgtttacttctgtgcgagagagggacattgcagtagtaccaattgtttctttgactcttggggccagggaaccctggtcaccgtctcctccgcctccacc

SEQ ID NO: 454 - DNA, 372 bp, Homo sapiens
caggtgcagctggtgcagtctggggctgaggtgaagaagcctggggcctcaatgagggtctcatgtcagacttcaggatacacgtttaactcctattatatacactggatgcgccaggtccctggacaaggccttgagtggatgggtggattaacccctaatagtggttacacaaactatacacagaaatttcagggaagggtcaccatgaccagggatacgtccattaacacagcctacctggagctcagtgccctgagatctgacgagacggccgtttattattgtgcgagagactttagcgacggttggccttactccttcgacttctggggccagggaactctagtcaccgtctcctcagcctccacc

SEQ ID NO: 455 - DNA, 348 bp, Homo sapiens
caggtgcagctggtgcagtctggggctgaactgaggaagtctggggcctcagcgaaggtctcctgcacggccactggatacaccttcaccgcctattatgtacactgggtgcgacaggcccctggacaaggtcttgagtggatgggatgtatcaatcctcagagtgatgacacaaagtatgcacagaaatttcaggggagggtcaccatgaccagggacacgtccaccaatacagcctacatggaactgagtggactgacatttgacgacacggccatgtattattgcctcactgcaatagatgggatcgtctactggggccagggacccctggtccaccgtttcctc

SEQ ID NO: 456 - DNA, 337 bp, Homo sapiens
caggtgcagctggtgcagtctggggctgaactgaggaagtctggggcctcagcgaaggtctcctgcacggccactggatacaccttcaccgcctattatgtacactgggtgcgacaggcccctggacaaggtcttgagtggatgggatgtatcaatcctcagagtgatgacacaaagtatgcacagaaatttcagggggaggtcaccatgaccagggacacgtccaccaatacagcctacatggaactgagtggactgacatttgacgacacggccatgtattattgcctcactgcaatagatgggatcgtctactggggccagggacccctggtcc

SEQ ID NO: 457 - DNA, 365 bp, Homo sapiens
caggtgcagctggtgcagtctggggctgaagtgaagaggcctggggcctcagtgagagtctcctgcaggacttctggatactcctttaccgcctattatatacactgggttcgacaggcccctggacaggggcttgagtggatgggaaggctcaaccctaacactggtggcgcagactcttcacagaagtttcagggcagagtcaccttgacccgggacacgtccatcaacacagcctacatggatctgaggaggctaagagttgacgactcggccacctattattgcgcgagcggcatacaggcaggtggtgcaaactactggggccagggaaccctggtcaccgtctcctccgcttccaccaa

SEQ ID NO: 458 - DNA, 366 bp, Homo sapiens
  misc_feature (348)..(348): n is a, c, g, or t
caggtgcagctgggacaatctggggctgaaatgaagaagcctggggcctcagtgatgctctcctgcaagacttctggatacaacttcatcgactactatatatactgggtgcgactggcccctggacgagggcttcagtggatgggatggataaaccctaacagaggtggcacaaagtatgcggagacctttcgggacaggctcaccatgaccagggacacgcccgtcagcacggcctatatggagctgaacaacctgagatctgacgacacggccgtctactactgtgcgagacttcaaagccttcatgggctttactctaacgctgactactggggccagggaacnctggtcaccgtctcctca

SEQ ID NO: 459 - DNA, 376 bp, Homo sapiens
caggtgcagctggtgcagtctgggcctgaagtgaagaagcctggggcctcactgaaggtctcctgtaaggcctccggatacaccttcatcgattattatattcactgggtgcgacaagtccctggacaacggcttgagtggatgggttggatcaaccctaagacaactggcgcactctatgcagacaactttcagggtagggtcaccatgaccagtgacacgtccatcaacacagtctacatggaggtgaccaggctgacatctgacgacacggccgtttactactgtgcgagagagggacattgcagtagtaccaattgtttcttgactcgttggggccagggaaccctggtcaccgtctcctcacgcctccacc

SEQ ID NO: 460 - DNA, 346 bp, Homo sapiens
caggtgcagctggtgcagtctggggctgaactgaggaagtctggggcctcagcgaaggtctcctgcacggccactggatacaccttcaccgcctattatgtacactgggtgcgacaggcccctggacaaggtcttgagtggatgggatgtatcaatcctcagagtgatgacacaaagtatgcacagaaatttcaggggagggtcaccatgaccagggacacgtccaccaatacagcctacatggaactgagtggactgacatttgacgacacggccatgtattattgcctcactgcaatagatgggatcgtctactggggccagggacccctggtccaccgtttcc

SEQ ID NO: 461 - DNA, 365 bp, Homo sapiens
caggtgcagctggtgcagtctgggactgacgtgcggaagcctggggcctcagtgaaggtctcctgcaaggcttctggatacaccttcagcgactactatatacactgggtgcgacaggcccctggacaacgtcttgagtggataggatggttcaatcctaacactggtggcgcacactatggactggactatcagggcagagtgacgatgaccggggacacgtccatcaccacagtctacatggagttgaccagactggcatccgacgacacggccatttattattgtgcgagagagggactttgagaactactagctgccaatttgacttcgtggggccagggacgctggtcaccgtcttctca

SEQ ID NO: 462 - DNA, 372 bp, Homo sapiens
caggtgcagctggtgcagtctggggctgaggtgaagaggcctggggcctcagtgagagtctcctgcaaggcttctggttactcctttaccgcctactttttgcactgggtgcgacaggcccctggacaagggcttgagtttatgggaaggctcaaccctaatactggtgccacagactttccacagaagtttcagggcagggtcaccgtgaccagggacacgtccattagcacagcctacatggaagtttatggactgagacctgaagacacggccgtctattattgtgcggccggaatacaggcaggtggtgcaaactactggggccagggaaccctggtcaccgtctcctccgcttccaccaagggccca

SEQ ID NO: 463 - DNA, 344 bp, Homo sapiens
caggtgcagctggtgcagtctggggctgaggtgaagacgcctggggcctcagtgaaagtctcctgcaggacttcaggatacaccttcaccgcttactacatacactgggtgcgacaggcccctggacacgggcttgagtgggtggggtggatcaattgtaacagtgccggcacattttatgcacagaagtttcagggcagggtcatcatgacgagggacacgtccaacaacactgtctacatgcaactgaatagcctgaattcagacgacacggccgtctattattgtgcgagagtgacgtcccccggagtctggggcaaggggaccacggtcaccgtctcttc

SEQ ID NO: 464 - DNA, 406 bp, Homo sapiens
caggtgcagctggtgcagtctggggctgaggtgaagaagcctggggcctcagtgaaggtctcctgcaaggcttctggatacaccttcaccgactactatctacactgggtgcggcaggcccctggacaagggcttgagtggatgggatggatcatgcctaacactggtggcgtacattcctcaccgaaatttcaggggagattctccgtgactagggacacgtcaaccagcacagcctacatgcaattgagtcgactgacatctgacgacacggccgtatactattgtgcgagaactgacggggactttattgactactggggccagggaacgctggtcaccgtctcgtcagcctccaccaagggcccatcggtcttcccctggcgccctgcctccaggacgcacc

SEQ ID NO: 465 - DNA, 378 bp, Homo sapiens
caggtgcagctggtgcagtctgggactgaggtgaggaatcctggggcctcagtgaaggtctcctgtaaggcttctggatataggttcaccgactattttatacactggatgcgacaggcccctggacaggggcttgagtggatgggatggatcgacccgcacggtggtggcacaaactacgcacagaagtttcagggcagggtcaccttggtgcgggacgcgtccatttccatggcctacatggaactgagcagcctgacatctgacgacacggccctatacttctgtgcgagagaagtggacacatctctagatttacttatctactacatggacgtctggggcaaagggccacggtcaccgtctcctcagggagtg

SEQ ID NO: 466 - DNA, 420 bp, Homo sapiens
caggtgcagctggtgcagtctgggcctgaagtgaagaagcctggggcctcactgaaggtctcccgtaaggcctccggatacaccttcatcgattattatattcactgggtgcgacaagtccctggacaacggcttgagtggatgggttggatcaaccctaagacaactggcgcactctatgcagacaactttcagggtagggtcaccatgaccagtgacacgtccatcaacacagtctacatggaggtgaccaggctgacatctgacgacacggccgtttactactgtgcgagagagggacattgcagtagtaccaattgtttctttgactcttggggccagggaaccctggtcaccgtctcctcagcctccaccaacgggcccatcggtcttccccctggccaccctcctccaacgacg

SEQ ID NO: 467 - DNA, 354 bp, Homo sapiens
caggtgcagctggtgcagtctgggtctgagatgaagaagcctggggcctcagtgaaggtgtcctgcaagacttctggatataccttcaccgactactacatacactgggtgcgacaggcccctggacaaggccttgagtggatggggtggatcaattgtaacagtgccggcacattttatgcacagaagtttcagggcagggtcatcatgacgagggacacgtccaacaacactgtctacatgcaactgaatagcctgaattcagacgacacagccgtctattattgtgcgagagtgagtcccccggacgtctggggcaaggggaccacggtcaccgtctcttcagcctccacc

SEQ ID NO: 468 - DNA, 353 bp, Homo sapiens
caggtgcagctgggacaatctggggctgaaatgaagaagcctggggcctcagtgatgctctcctgcaagacttctggatacaacttcatcgactactatatatactgggtgcgactggcccctggacgagggcttcagtggatgggatggataaaccctaacagaggtggcacaaagtatgcggagacctttcgggacaggctcaccatgaccagggacacgtccgtcagcacggcctatatggagctgaacaacctgagatctgacgacacggccgtctactactgtgcgagacttcaaagccttcatgggctttactctaacgctgactactggggccagggaacgctggt

SEQ ID NO: 469 - DNA, 369 bp, Homo sapiens
caggtgcagctggtgcagtctggggctgaggtgaagaagcctggggcctcagtgagggtcacctgcagggcttctggattcagtgtcagcgactacggtgttcattgggtgcgacaggcccctggacaaggccttgagtggatgggatggatcaatcatttcagtggtggcgccacatacgcagaggtatttcagggccgggtcgccatgaccagggacacgtccatcaacacagccttcatggaactgagaagtctgagatctgacgacacggccgtgtattactgtgcgagagataccccacgatattgtagtagtaccagctgctacatggaggtctggggcaaagggaccacggtcaccgtctcc

SEQ ID NO: 470 - DNA, 360 bp, Homo sapiens
caggtgcagctggtgcagtctggggctgagatgaagaagcctggggcctcagtgaaggtctcctgcaagacttctggatacaccttcaccgactactatatacattgggtgcggcaggcccctggacatgggcttgagtggatggcctggatcaaccctagcggtggtgccacaatctatgcagaggcttttgagggcagggtcaccgtaaccacggacacgtccatgaaaacagtctacatggagttggagagcctgacatctggcgacacggccatgtatttctgcgccagagatgcgactccgataactacggaatttgactactggggccagggaacactgatcaccgtctcctca

SEQ ID NO: 471 - DNA, 400 bp, Homo sapiens
caggtgcagctggtgcagtctggggctgaggtgaagacgcctggggcctcagtgaaagtctcctgcaggacttcaggatacaccttcaccgcttactacatacactgggtgcgacaggcccctggacacgggcttgagtgggtggggtggatcaaccccagtggaggtgccacaatctatgcacagaagtttgagggcagggtcaccttgaccagcgacacgtccattagtacagcctatttggagttgagcaacctgagacctgacgacacggccacatattattgtgtaagagatgcgactccggtgacaacggaattcgacttctggggccagggagcgctggtcaccgtctcctcacgcctccaccacggcccatccggtccttcccccgtcggcc

SEQ ID NO: 472 - DNA, 372 bp, Homo sapiens
caggtgcagctggtgcagtctggggctgaggtgaagaagcctggggcctcagtaagggtctcctgcaaggcttctggatcctccctacacgcctattatatacactgggtgcggcaggcccctggacagcggcctgagtggatggggtggctcaaccctaacagtggtggcacaaactatgcaccaaagtttcaggacagggtcaccttgaccagggagacgtccatcggcacaacccacctggggctgcgcggactggggtctgacgacacggccgtctattactgtgcgaccgaccggctaggcccccaaggctatattaactactactttgaatcctggggccagggagccctgatcaccgtctcctca

SEQ ID NO: 473 - DNA, 361 bp, Homo sapiens
caggtgcagctggtgcaagtctgggttgaggtgaagaagccctgggcctcaatgaaggtctcctgcaaggcttctggatacaatttcaccggctactttatccactgggtgcgacagggccctggacaagggcttgagtggatgggatggatgaacccaaacaccggtggcgcaaagtatgcacagaagtttcagggcagggtcaccatgaccagggacacatccatcagaacagcctacatggaactgagcagcctaaaaacccgcgacacggccgtttattattgtgcgcgagacccccaagacggcactacttggtacacgcactggggccagggaacactggtcaccgtctcctcag

SEQ ID NO: 474 - DNA, 366 bp, Homo sapiens
caggtgcagctggtgcagtctgggactgaagtgaagaagcctggggcctcactgaaggtctcctgtaaggcctccggatacaccttcatcgattactatattcactgggtgcgacaagtccctggacaacggcttgagtggatgggttggatcaaccctaagactactggcgcactctatgcagacaactttcagggtagggtcaccatgaccagtgacacgtccatcaacacagtctacatggaggtgaccaggctgacatctgacgacacggccctttactactgtgcgagagaggggcattgtggtagtaccaattgtttctttgacttctggggccagggaaccctggtcaccgtctcctca

SEQ ID NO: 475 - DNA, 366 bp, Homo sapiens
caggtgcagctgggacaatctggggctgaaatgaagaagcctggggcctcagtgatgctctcctgcaagacttctggatacaacttcatcgactactatatatactgggtgcgactggcccctggacgagggcttcagtggatgggatggataaaccctaacagaggtggcacaaagtatgcggagacctttcgggacaggctcaccatgaccagggacacgtccgtcagcacggcctatatggagctgaacaacctgagatctgacgacacggccgtctactactgtgcgagacttcaaagccttcatgggctttactctaacgctgactactggggccagggaacgctggtcaccgtctcctca

SEQ ID NO: 476 - DNA, 443 bp, Homo sapiens
caggtgcagctggtgcagtctggggctgaactgaggaagtctggggcctcagcgaaggtctcctgcacggccactggatacaccttcaccgcctattatgtacactgggtgcgacaggcccctggacaaggtcttgagtggatgggatgtatcaatcctcagagtgatgacacaaagtatgcacagaaatttcaggggagggtcaccatgacaagggacacgtccaccaatacagcctacatggaactgagtggactgacatttgacgacacggccatgtattattgcctcactgcaatagatgggatcgtctactggggccagggacccctggtcaccgtttcctcagcctccaccaagggcccatcggtcttccccctggcaccctcctccaagagcacctctgggggcacagcagccctggctgcctggtcaaggactac

SEQ ID NO: 477 - DNA, 381 bp, Homo sapiens
caggtgcagctggtgcagtctggggctgaggtgaagaagcctggggcctcagtaagggtctcctgcaaggcttctggatcctccctacacgcctattatatacactgggtgcggcaggcccctggacagcggcctgagtggatggggtggctcaaccctaacagtggtggcacaaactatgcaccaaagtttcaggacagggtcaccttgaccagggagacgtccatcggcacaacccacctgggggtgcgcggactggggtctgacgacacggccgtctattactgtgcgaccgaccggctaggcccccaaggctatattaactactactttgaatcctggggccagggagccctgatcaccgtctcctcagcctccacc

SEQ ID NO: 478 - DNA, 345 bp, Homo sapiens
caggtgcagctggtgcagtctggggctgaactgaggaagtctggggcctcagcgaaggtctcctgcacggccactggatacaccttcaccgcctattatgtacactgggtgcgacaggcccctggacaaggtcttgagtggatgggatgtatcaatcctcagagtgatgacacaaagtatgcacagaaatttcaggggagggtcaccatgaccagggacacgtccaccaatacagcctacatggaactgagtggactgacatttgacgacacggccatgtattattgcctcactgcaatagatgggatcgtctactggggccagggacccctggtcaccgttcct

SEQ ID NO: 479 - DNA, 339 bp, Homo sapiens
caggtgcagctggtgcagtctggggctgacgtgaaggagtctggggcctcattgaaagtctcctgcaaggcttctggacacaccttcgccgcctattatgtacattgggtgcgacaggcccctggacaagggcttgagtggatgggatggatccagcctaatagcggagtcacaaagaatgcacagacctttaggggcaggctcaccatgaccagggacacgtccatcaacacagtttacatggaactgagcagactgagattcgacgacacggccctatattactgtacggagagactcagggaatggggccagggatcgctggtcaccgtctcctca

SEQ ID NO: 480 - DNA, 418 bp, Homo sapiens
caggtgcagctggtgcagtctgggcctgaagtgaagaagcctggggcctcactgaaggtctcctgtaaggcctccggatacaccttcatcgattattatattcactgggtgcgacaagtccctggacaacggcttgagtggatgggttggatcaaccctaagacaactggcgcactctatgcagacaactttcagggtagggtcaccatgaccagtgacacgtccatcaacacagtctacatggaggtgaccaggctgacatctgacgacacggccgtttactactgtgcgagagagggacattgcagtagtaccaattgtttctttgactcttggggccagggaaccctggtcaccgtctcctcagggagtgcatccgccccaacccttttccccctcgtctcctctgagaattccc

SEQ ID NO: 481 - DNA, 347 bp, Homo sapiens
caggtgcagctggtgcagtctggggctgaactgaggaagtctggggcctcagcgaaggtctcctgcacggccactggatacaccttcaccgcctattatgtacactgggtgcgacaggcccctggacaaggtcttgagtggatgggatgtatcaatcctcagagtgatgacacaaagtatgcacagaaatttcaggggagggtcaccatgaccagggacacgtccaccaatacagcctacatggaactgagtggactgacatttgacgacacggccatgtattattgcctcactgcaatagatgggatcgtctactggggccagggacccctggtccaccgtttcct

SEQ ID NO: 482 - DNA, 383 bp, Homo sapiens
caggtgcagctggtgcagtctgggtctgagatgaagaagcctggggcctcagtgaaggtgtcctgcaagacttctggatataccttcaccgactactacatacactgggtgcgacaggcccctggacaaggccttgagtggatggggtggatcaattgtaacagtgccggcacattttatgcacagaagtttcagggcagggtcatcatgacgagggacacgtccaaacaacactgtctacatgcaactgaatagcctgaattcagacgacacggccgtctattattgtgcgagagtgagtcccccggagtctggggcaaggggaccacggtcaccgtctcttcagcctccaccaagggcccatccggtcttccccctggcca

SEQ ID NO: 483 - DNA, 327 bp, Homo sapiens
caggtgcagctggtgcagtctggggctgaactgaggaagtctggggcctcagcgaaggtctcctgcacggccactggatacaccttcaccgcctattatgtacactgggtgcgacaggcccctggacaaggtcttgagtggatgggatgtatcaatcctcagagtgatgacacaaagtatgcacagaaatttcaggggagggtcaccatgaccagggacacgtccaccaatacagcctacatggaactgagtggactgacatttgacgacacggccatgtattattgcctcactgcaatagatgggatcgtctactggggccaggga

SEQ ID NO: 484 - DNA, 368 bp, Homo sapiens
caggtgcagctggtgcagtctggggctgaactgaggaagtctggggcctcagcgaaggtctcctgcacggccactggatacaccttcaccgcctattatgtacactgggtgcgacaggcccctggacaaggtcttgagtggatgggatgtatcaatcctcagagtgatgacacaaagtatgcacagaaatttcaggggagggtcaccatgaccagggacacgtccaccaatacagcctacatggaactgagtggactgacatttgacgacacggccatgtattattgcctcactgcaatagatgggatcgtctactggggccagggacccctggtcaccgtttcctcacgcctccaccaacggaccca

SEQ ID NO: 485 - DNA, 363 bp, Homo sapiens
caggtgcagctggtgcagtctggggctgaggtgaggaagcctggggcctcagtgaaggtctcctgcacggcttctggatacaccttcaccggccactatatcctctgggtgcgacaggcccgtggacaaggacttgagtgggtgggatggatcaatggtgacagaggcgacacaaagtactcacacaaatttcagggcagggtcgtcatgaccagggacaggtccaccagcacagtctccatggagttgagtagattgacatctgacgacacggccatatattattgtgcgagagatttggtccgagatggttatgatgctttagatatctggggccgagggacactggtcaccgtctcttca

SEQ ID NO: 486 - DNA, 429 bp, Homo sapiens
caggtgcagctggtgcagtctgggactgaagtgaagaagcctggggcctcactgaaggtctcctgtaaggcctccggatacaccttcatcgattactatattcactgggtgcgacaagtccctggacaacggcttgagtggatgggttggatcaaccctaagactactggcgcactctatgcagacaactttcagggtagggtcaccatgaccagtgacacgtccatcaacacagtctacatggagctgaccaggctgacatctgacgacacggccctttactactgtgcgagagaggggcattgtggtagtaccaattgtctctttgacttctggggccagggaaccctggtcaccgtctcctcagcctccaccaaggcccatcggtcttcccctgcaccctgctccaggagcacctccgagacgcac

SEQ ID NO: 487 - DNA, 375 bp, Homo sapiens
caggtgcagctggtgcagtctgggactgaagtgaagaagcctggggcctcactgaaggtctcctgtaaggcctccggatacaccttcatcgattactatattcactgggtgcgacaagtccctggacaacggcttgagtggatgggttggatcaaccctaagactactggcgcactctatgcagacaactttcagggtagggtcaccatgaccagtgacacgtccatcaacacagtctacatggaggtgaccaggctgacatctgacgacacggccctttactactgtgcgagagaggggcattgtggtagtaccaattgtttctttgacttctggggccagggaaccctggtcaccgtctcctcagcctccacc

SEQ ID NO: 488 - DNA, 327 bp, Homo sapiens; identical to SEQ ID NO: 483

SEQ ID NO: 489 - DNA, 419 bp, Homo sapiens
caggtgcagctggtgcaatctggggctgaagtgaaggagtctggggcctcagtgaaggtctcctgcgaggcttctacatataccttcatcggctactatttacactgggtacgacaggcccctggacaaggacttgagtggatgggatggatcaatcctgacaatggtgccacaaattatgcacagaaatttcagggcagggtcaccatgactagagtcacgtccatcaatacagcctacatggacctcaataatctgacatctgacgacacggccgtctatttttgtgcgagagccgaggggatttggttaggggagcccgcgccttttgatctctggggccaagggacaatggtcatcgtctctttagggagtgcatccgccccaacccttttcccctcgtctcctctgagaattcc

SEQ ID NO: 490 - DNA, 367 bp, Homo sapiens
caggtgcagctggtgcagtctggggctgaaatgaagaaacctggggcctcagtgaaggtctcctgcaaggcctctggatacacattcaccgccttctatatacactggctgcgccaggcccctgggcaggggcctgaatggatgggctggatcaaccctatcaatggagccacaatttacgcagagacctttgagggcagggtcaccctgaccagggacacgtccaccaacacagcctacatggagctgagcagcctaaaatcttacgacacggccgtttattattgtgcgagagacgcgcctccgattactacggaatttgaccagtggggccagggaaccctggttacgcgtctcctcagcctcc

SEQ ID NO: 491 - DNA, 358 bp, Homo sapiens
caggtgcagctggtgcaatctggagctgaggtaaagaagcctggggcctcagtgaaggtctcctgcacggccactggatacaccttcaccgcctattatgtacactgggtgcgacaggcccctggacaaggtcttgagtggatgggatgtatcaatcctcagagtgatgacacaaagtatgcacagaaatttcaggggagggtcaccatgaccagggacacgtccaccaatacagcctacatggaactgagtggactgacatttgacgacacggccatgtattattgcctcactgcaatagatgggatcgtctactggggccagggacccctggtccaccgtttcctcgacgggacca

SEQ ID NO: 492 - DNA, 380 bp, Homo sapiens
caggtgcagctggtgcagtctggggctgagatgatgaagcctggggccacactgaaggtctcctgcaagacttctggatacaccttcaccaaattttatatacactgggtgcggcaggcccctggacaaggccttgagtggatgggatggatcaaccctaccagtggtaatacaaagtccgcgcagaaatttcagggccgggtcaccatgaccagtgacacgtccatcaacacagcctacacggagctgagtaaactgagatctgacgacgcggccatatattactgtgcgaaacttgccgattactataattcggagaatggtgctttagaaatctggggccaagggacaatggtcaccgtctcttcagcctccaccaa

SEQ ID NO: 493 - DNA, 355 bp, Homo sapiens
caggtgcagctggtgcagtctggggctgaaatgaagaaacctggggcctcagtgaaggtctcctgcaaggcctctggatacacattcaccgccttctatatacactggctgcgccaggcccctgggcaggggcctgaatggatgggctggatcaaccctatcaatggagccacaatttacgcagagacctttgagggcagggtcaccctgaccagggacacgtccaccaacacagcctacatggagctgagcagcctaaaatcttacgacacggccgtttattattgtgcgagagacgcgcctccgattactacggaatttgaccagtggggccagggaaccctggttagcgtct

SEQ ID NO: 494 - DNA, 345 bp, Homo sapiens
caggtgcagctggtgcagtctggggctgaactgaggaagtctggggcctcagcgaaggtctcctgcacggccactggatacaccttcaccgcctattatgtacactgggtgcgacaggcccctggacaaggtcttgagtggatgggatgtatcaatcctcagagtgatgacacaaagtatgcacagaaatttcaggggagggtcaccatgaccagggacacgtccaccaatacagcctacatggaactgagtggactgacatttgacgacacggccatgtattattgcctcactgcaatagatgggatcgtctactggggccagggaaccctggtcaccgtctcc

SEQ ID NO: 495 - DNA, 346 bp, Homo sapiens
caggtgcagctggtgcagtctggggctgaactgaggaagtctggggcctcagcgaaggtctcctgcacggccactggatacaccttcaccgcctattatgtacactgggtgcgacaggcccctggacaaggtcttgagtggatgggatgtatcaatcctcagagtgatgacacaaaatatgcacagaaatttcaggggagggtcaccatgaccagggacacgtccaccaatacagcctacatggaactgagtggactgacatttgacgacacggccatgtattattgcctcactgcaatagatgggatcgtctactggggccagggacccctggtccaccgtttcc

SEQ ID NO: 496 - DNA, 384 bp, Homo sapiens
caggtgcagctggtgcagtcaggggctgaggtgaggccgcctggggcctcagtgaaggtctcctgtaaggcgtctggatacactttcaccgcctacgatatgcactgggtgcgacaggcctctggacaagggcttgagtggatgggtagggtcaaccctaacaacggggccacaaaggttgcagagaagtttcggggcagggtctccatgaccacggacacgtccatcaccacagcctacatggatatacacggactgacatctgacgacacggccgtctattactgtgcgagagatcggggggatcacgtctactattacgcgatggacacctggggccgagggaccacggtctccgtctcctcagcctccaccaagggccca

SEQ ID NO: 497 - DNA, 363 bp, Homo sapiens
caggtgcagctggtgcagtctggggctgaggtgaggaagcctggggcctcagtgaaggtctcctgcacggcttctggatacaccttcaccggccactatatcctctgggtgcgacaggccccgggacaaggacttgagtgggtgggatggatcaatggtgacagaggcgacacaaagtactcacacaaatttcagggcagggtcgtcatgaccagggacaggtccaccagcacagtctccatggagttgagtagattgacatctgacgacacggccatatattattgtgcgagagatttggtccgagatggttatgatgctttagatatctggggccgagggacactggtcaccgtctcttca

SEQ ID NO: 498 - DNA, 378 bp, Homo sapiens
caggtgcagctggtgcagtctggggctgagatgatgaagcctggggccacactgaaggtctcctgcaagacttctggatacaccttcaccaaattttatatacactgggtgcggcaggcccctggacaaggccttgagtggatgggatggatcaaccctaccagtggtaatacaaagtccgcgcagaaatttcagggccgggtcaccatgaccagtgacacgtccatcaacacagcctacatggagctgagtaaactgagatctgacgacgcggccatatattactgtgcgaaacttgccgattactataattcggagaatggtgctttagaaatctggggccaagggacaatggtcaccgtctcttcagcctccacc

SEQ ID NO: 499 - DNA, 385 bp, Homo sapiens
caggtgcagctggtgcagtcaggggctgaggtgaggccgcctggggcctcagtgaaggtctcctgtaaggcgtctggatacactttcaccgcctacgatatgcactgggtgcgacaggcccctggacaagggcttgagtggatgggtagggtcaaccctaacaacggggccacaaaggttgcagagaagtttcggggcagggtctccatgaccacggacacgtccatcaccacagcctacatggatatacacggactgacatctgacgacacggccgtctatttctgtgcgagagatcggggggatcacttctactattacgcgatggacacctggggccgagggaccacggtctccgtctcctcagcctccaccaacgggccca

SEQ ID NO: 500 - DNA, 366 bp, Homo sapiens; identical to SEQ ID NO: 474

SEQ ID NO: 501 - DNA, 438 bp, Homo sapiens
caggtgcagctggtgcagtctggggctgacgtgaaggagcctggggcctcattgaaagtctcctgcaaggcttctggacacaccttcgccgcctattatgtacattgggtgcgacaggcccctggacaagggcttgagtggatgggatggatccagcctaatagcggagtcacaaagaatgcacagacctttaggggcaggctcaccatgaccagggacacgtccatcaacacagtttacatggaactgagcagactgagattcgacgacacggccctatattactgtacggagagactcagggaatggggccagggatcgctggtcaccgtctcctcagcctccaccaagggcccatccggtcttccccctggccgccctgctccaggacgcacctccgagagcacagcggccctgggctgcctggtcaaggactac

SEQ ID NO: 502 - DNA, 367 bp, Homo sapiens
caggtgcagctggtgcagtctggggcagaggtgaagaagcctggggcctcagtgaaggtctcctgcggggcttctggatacaccttcagcaactactatatacattggctgcggcaggcccctggacaagggcttgagtggatggcctggatcaaccctagcggtggtgccacaatctatgcagagaattttcagggcagggtcaccgtaacccgggacacgtccatggaaacagtctacatggaattgaacagcctgacatctggcgacacggccgtgtattattgtgccagagatgcgactccgataactacggaatttgacttctggggccagggaacgctgatcaccgtctcctcacgcctcc

SEQ ID NO: 503 - DNA, 357 bp, Homo sapiens
caggtgcagctggtgcagtctggggctgacgtgaagaagcctggggcctcagtgaaggtctcctgcaaggcctctggatataacttcatcacttactatatacacttggtgcgacaggcccctggacaagggcttgagtggatgggatgtatcaaccctaatagtggtggcacaaattatgcacagaggtttcaggacaaggtctccatgaccagggacacgtccatcagcacagcctacatggaactgagaagactgatatctgacgacacggctatctattttgtctcactgcattagatggtgtcgcgtacgtggggccagggaacgctggtcaccgtctccgtcacgcctcca

SEQ ID NO: 504 - DNA, 494 bp, Homo sapiens
caggtgcagctggtgcagtcaggggctgaggtgaggccgcctggggcctcagtgaaggtctcctgtaaggcgtctggatacactttcaccgcctacgatatgcactgggtgcgacaggcccctggacaagggcttgagtggatgggtagggtcaaccctaacaacggggccacaaaggttgcagagaagtttcggggcagggtctccatgaccacggacacgtccatcaccacagcctacatggatatacacggactgacatctgacgacacggccgtctatttctgtgcgagagatcggggggatcacttctactattacgcgatggacacctggggccgagggaccacggtctccgtctcctcagcctccaccaagggcccatcggtcttccccctggcaccctcctccaagagcacctctgggggcacagcagccctgggctgcctggtcaaggactacttccccgaaccggtgacggtgtcgtggaactc

SEQ ID NO: 505 - DNA, 360 bp, Homo sapiens
caggtgcagctggtgcagtctggggcagaggtgaagaagcctggggcctcagtgaaggtctcctgcggggcttctggatacaccttcagcaactactatatacattggctgcggcaggcccctggacaagggcttgagtggatggcctggatcaaccctagcggtggtgccacaatctatgcagagaattttcagggcagggtcaccgtaacccgggacacgtccatggaaacagtctacatggaattgaacagcctgacatctggcgacacggccgtgtattattgtgccagagatgcgactccgataactacggaatttgacttctggggccagggaacgctgatcaccgtctcctca

SEQ ID NO: 506 - DNA, 416 bp, Homo sapiens
caggtgcagctggtgcagtcaggggctgaggtgaggccgcctggggcctcagtgaaggtctcctgtaaggcgtctggatacactttcaccgcctacgatatgcactgggtgcgacaggcccctggacaagggcttgagtggatgggtaggatcaaccctaacaacggggccacaaaggttgcagagaagtttcggggcagggtctccatgaccacggacacgtccatcaccacagcctacatggatatacacggactgacatctgacgacacggccgtctatttctgtgcgagagatcggggggatcacttctactattacgcgatggacacctggggccgagggaccacggtctccgtctcctcagcctccaccaaggcccatcggtcttcccctcggccaccctcctccaacga

SEQ ID NO: 507 - DNA, 442 bp, Homo sapiens
caggtgcagctggtgcagtctggggctgacgtgaagaagcctggggcctcagtgaaggtctcctgcaaggcctctggatataacttcatcacttactatatacattgggtgcgacaggcccctggacaagggcttgagtggatgggatgtatcaaccctaatagtggtggcacaaattatgcacagaggtttcaggacaaggtctccatgaccagggacacgtccatcagcacagcctacatggaactgagaagactgatatctgacgacacggctatctatttttgtctcactgcattagatggtgtcgcgtactggggccagggaacgctggtcaccgtctcctcagcctccaccaagggcccatcggtcttcccctggcaccctcctccaagacgcacctctggggcacagcagccctggctgcctggtcaaggactac

SEQ ID NO: 508 - DNA, 386 bp, Homo sapiens
caggtgcagctggtgcagtcaggggctgaggtgaggccgcctggggcctcagtgaaggtctcctgtaaggcgtctggatacactttcaccgcctacgatatgcactgggtgcgacaggcccctggacaagggcttgagtggatgggtagggtcaaccctaacaacggggccacaaaggttgcagagaagtttcggggcagggtctccatgaccacggacacgtccatcaccacagcctacatggatatacacggactgacatctgacgacacggccgtctatttctgtgcgagagatcggggggatcacttctactattacgcgatggacacctggggccgagggaccacggtctccgtctcctcacgcctccaccaacgggccca

SEQ ID NO: 509 - DNA, 359 bp, Homo sapiens
caggtgcagctggtgcagtctggggctgacgtgaaggagcctggggcctcattgaaagtctcctgcaaggcttctggacacaccttcgccgcctattatgtacattgggtgcgacaggcccctggacaagggcttgagtggatgggatggatccagcctaatagcggagtcacaaaggatgcacagacctttaggggcaggctcaccatgaccagggacacgtccatcaacacagtttacatggaactgagcagactgagattcgacgacacggccctatattactgtacggagagactcagggaatggggccagggatcgctggtcaccgtctcctcacgcctccaccaacgggccca

SEQ ID NO: 510 - DNA, 366 bp, Homo sapiens
caggtgcagctggtgcagtctgggactgaagtgaagaagcctggggcctcactgaaggtctcctgtaaggcctccggatacaccttcatcgattactatattcactgggtgcgacaagtccctggacaacggcttgagtggatgggttggatcaaccctaagactactggcgcactctatgcagacaactttcagggtagggtcaccatgaccagtgacacgtccatcaacacagtctacatggaggtgaccaggctgacatctgacgacacggccctttactactgtgcgagagaggggcattgtggtagtaccaattgtctctttgacttctggggccagggaaccctggtcaccgtctcctca

SEQ ID NO: 511 - DNA, 357 bp, Homo sapiens
caggtgcagctggtgcagtctggggctgaggtgaagaagcctggggcctcagtgaaggtctcctgcaaggcttctggatacatcttcgccggctactatatggagtgggtgcggcagacccctggacaagggcttgagtggatgggatggatcgaccctagcggtggtgccacaatctatgcagaggcttttgagggcagggtcaccgtaaccacggacacgtccatgaaaacagtctacatggagttggagagcctgacatctggcgacacggccatgtatttctgcgccagagatgcgactccgataactacggaatttgactactggggccagggaacactgatcaccgtctcc

SEQ ID NO: 512 - DNA, 358 bp, Homo sapiens
caggtgcagctggtgcagtctggggctgacgtgaaggagcctggggcctcattgaaagtctcctgcaaggcttctggacacaccttcgccgcctattatgtacattgggtgcgacaggcccctggacaagggcttgagtggatgggatggatccagcctaatagcggagtcacaaagaatgcacagacctttaggggcaggctcaccatgaccagggacacgtccatcaacacagtttacatggaactgagcagactgagattcgacgacacggccctatattactgtacggagagactcagggaatggggccagggatcgctggtcaccgtctcctcagcctccaccaacgggccca

SEQ ID NO: 513 - DNA, 438 bp, Homo sapiens
caggtgcagctggtgcagtctgggtctgaggtgaggaagcctggggcctcagtgaaggtgtcctgcaagacttctggatataccttcatcgactactacatacactgggtgcgacaggcccctggacaagggcttcagtggatgggatgggtcaattgtaacagtggcgacaccttttacggacagaggtttcagggcagagtcaccatgaccagggacacgtccaacaacacagtctacatggaaactgagcaggctgaattcagacgacacggccgtgtattattgtgggagagtgagtcccccggagtctggggcaaagggaccacggtcatcgtctcttcagcctccaccaagggcccatcggtcttccccctggccaccctcctccaagacgcacctcgtcggggcacgagcggccctgggctgcctggtcaa

SEQ ID NO: 514 - DNA, 378 bp, Homo sapiens
caggtgcagctggtgcagtctgggcctgaggtgaagaagcctggggcctcagtgaaggtctcctgtaaggcctctggatacactcgcaacacctactatgtgcactgggtgcgacaggcccctggacaaggtcttgagtggatgggatggatcaaccctaacagtggtggcacaaattatgcacagaaattccagggcagactcacgatcaccacggacgaactgaggactacagcctacatggagctgagcagcctgaaatctgaggacacggccgtctattactgtgcgagaaataccgactcagtggctacctccttgtacagtttgggcgtctggggccaagggaccgtggtcaccgtctcctcagcctccacc

SEQ ID NO: 515 - DNA, 495 bp, Homo sapiens
caggtgcagctggtgcagtctgggactgaagtgaagaagcctggggcctcactgaaggtctcctgtaaggcctccggatacaccttcatcgattactatattcactgggtgcgacaagtccctggacaacggcttgagtggatgggttggatcaaccctaagactactggcgcactctatgcagacaactttcagggtagggtcaccatgaccagtgacacgtccatcaacacagtctacatggaggtgaccaggctgacatctgacgacacggccctttactactgtgcgagagaggggcattgtggtagtaccaattgtttctttgacttctggggccagggaaccctggtcaccgtctcctcagcctccaccaagggcccatcggtcttccccctcggcaccctcctccaagacgcacctctggggcacagcggccctgggctgcctggtcaaggactacttccccgaaccggtgacggtgtcgtggaactc

SEQ ID NO: 516 - DNA, 357 bp, Homo sapiens
caggtgcagctggtgcagtctggggctgaggtgaagaagtctggggcctcagtgaaggtctcctgcaagacttctggatacaccttcaccagttatgatatcaattgggtgcgacaggtcactggacaagggcttgagtggatgggatggatgaaccctaatagtggtggcacaaattatgcacagaggtttcaggacaaggtctccatgaccagggacacgtccatcagcacagcctacatggaactgagaagactgatatctgacgacacggctatctatttttgtctcactgcattagatggtgtcgcgtactggggccagggaacgctggtcaccgtctcctcagcctccacc

SEQ ID NO: 517 - DNA, 367 bp, Homo sapiens
caggtgcagctggtgcagtctggggctgacgtgaagaagcctggggcctcagtgaaggtctcctgcaggcctctggatataacttcatcacttactatatacattgggtgcgacaggccccctggacaagggcttgagtggatgggatgtatcaaccctaatagtggtggcacaaattatgcacagaggtttcaggacaaggtctccatgaccagggacacgtccatcagcacagcctacatggaactgagaagactgatatctgacgacacggctatctatttttgtctcactgcattagatggtgtcgcgtactggggccagggaacgctggtcaccgtctcctcagcctccaccaacgggccca

SEQ ID NO: 518 - DNA, 368 bp, Homo sapiens
caggtgcagctggtgcagtctgggactgacgtgcggaagcctggggcctcagtgaaggtctcctgcaaggcttctggatacaccttcaccgactactatattcactgggtgcgacaggcccctggacaacgtcttgagtggatgggatggttcaatcctaacactggtggcgcacactatggactggactatcagggcagagtcactatgaccggggacacgtccatgaccacagtctacatggagttgaccaggctggcatccgacgacacggccatttattattgtgcgagagagggactttgtagaactaccagctgccaatttgactactggggccagggaacgctggtcaccgtcttctcacg

SEQ ID NO: 519 - DNA, 350 bp, Homo sapiens
caggtgcagctggtgcagtctggggctgacgtgaagaagcctggggcctcagtgaaggtctcctgcaaggcctctggatataacttcatcacttactatatacattgggtgcgacgggcccctggacaagggcttgagtggatgggatgtatcaaccctaatagtggtggcacaaattatgcacagaggtttcaggacaaggtctccatgaccagggacacgtccatcagcacagcctacatggaactgagaagactgatatctgacgacacggctatctatttttgtctcactgcattagatggtgtcgcgtactggggccagggaacgctggtcaccgtctcctcacg

SEQ ID NO: 520 - DNA, 366 bp, Homo sapiens
caggtgcagctggtgcagtttggggctgacatgaagaagcctgggtcctcggtgaaagtcacctgcaaggcctctggagacggcttcaccagctatgcggtcagctgggtgcgacaggcccctggacaagggcttgagtggatgggatggatcaaccctaacagaggtggcacaaagtatgcacagaagtttcagggcagggtcaccatgaccagggacacggccgtcaacacggcctatatggagctgaacagcctgagatctgacgacacggccgtctactactgtgcgagactacaaagccttagtgggttttactccaacgctgactactggggccagggaacgctggtcaccgtctcctca

SEQ ID NO: 521 - DNA, 366 bp, Homo sapiens
caggtgcagctggaacaatctggggctgaagtgaagaagcctggggcctcagtgatgctctcctgcaagacttctggatacaccttcatcgactactatatatactgggtgcgactggcccctggacgagggcttcagtggatgggatggatgaaccctaacagaggtggcacaaagtatgcagagacctttcgggacagggtcaccatgaccagggacacgtccgtcagcacggcctatatggagctaaacaacctgagatctgacgacacggccgtctactactgtgcgagacttcaaagccttcatgggctttactctaacgctgactactggggccagggaacgctggtcaccgtctcctca

SEQ ID NO: 522 - DNA, 405 bp, Homo sapiens
caggtgcagctggtgcagtctggggctgacgtgaagaagcctggggcctcagtgaaggtctcctgcaaggcctctggatataacttcatcacttactatatacattgggtgcgacaggcccctggacaagggcttgagtggatgggatgtatcaaccctaatagtggtggcacaaattatgcacagaggtttcaggacaaggtctccatgaccaaggacacgtccatcagcacagcctacatggaactgagaagactgatatctgacgacacggctatctatttttgtctcactgcattagatggtgtcgcgtactggggccagggaacgctggtcaccgtctcctcagcctccaccaacgggcccactcggtcttccccctcggccaccctccctccaacgacg

SEQ ID NO: 523 - DNA, 348 bp, Homo sapiens
caggtgcagctggtgcagtctggggctgacgtgaagaagcctggggcctcagtgaaggtctcctgcaaggcctctggatataacttcatcacttactatatacattgggtgcgacgggcccctggacaagggcttgagtggatgggatgtatcaaccctaatagtggtggcacaaattatgcacagaggtttcaggacaaggtctccatgaccagggacacgtccatcagcacagcctacatggaactgagaagactgatatctgacgacacggctatctatttttgtctcactgcattagatggtgtcgcgtactggggccagggaacgctggtcaccgtctcctca

SEQ ID NO: 524 - DNA, 366 bp, Homo sapiens
caggtgcagctggtgcagtctgggactgacgtgcggaagcctggggcctcagtgagggtctcctgcaaggcttctggatacaccttcaccgactactatatacactgggtgcgacaggcccctggacaacgtcttgagtggatgggatggttcaatcctaacactggtggcgcacactatggactggactatcagggcagagtcacgatgaccggggacacgtccatcaccacagtctacatggagttgaccagactggcatccgacgacacggccatttattattgtgcgagagagggactttgtggaactaccagctgccaatttgacttctggggccagggaacgctggtcaccgtcttctca

SEQ ID NO: 525 - DNA, 376 bp, Homo sapiens
caggtgcagctggtgcagtctggggctgaggtgaagaagcctggggcctcagtgaaggtctcctgcagggcttctggatacaggttcaccggctactatgtccattgggtgcgacaggcccctggagaaggacttgagtggatgggatagatcaatcctaatgatggaaacacagtctattcacagaagtatcagggcagggtctccatgacctgggacatgtccatctacacagcctatatggagatgagtaggctgacatctgacgacacggccgtgtattactgtgcgagcccctctcctgcgttgggctacttctcttactacatggacgtctggggcaagggaccacggtcatcgtcctcctcacgcctcc

SEQ ID NO: 526 - DNA, 348 bp, Homo sapiens
caggtgcagctggtgcagtctggggctgacgtgaagaagcctggggcctcagtgaaggtctcctgcaaggcctctggatataacttcatcacttactatatacattgggtgcgacaggcccctggacaagggcttgagtggatgggatgtatcaaccctaatagtggtggcacaaattatgcacagaggtttcaggacaaggtctccatgaccagggacacgtccatcagcacagcctacatggaactgagaagactgatatctgacgacacggctatctatttttgtctcactgcattagatggtgtcgcgtactggggccagggaacgctggtcaccgtctcctca

SEQ ID NO: 527 - DNA, 358 bp, Homo sapiens
caggtgcagctggtgcagtctggggctgacgtgaagaagcctggggcctcagtgaaggtctcctgcaaggcctctggatataacttcatcacttactatatacattgggtgcgacaggcccctggacaagggcttgagtggatgggatgtatcaaccctaatagtggtggcacaaattatgcacagaggtttcaggacaaggtctccatgaccagggacacgtccatcagcacagcctacatggaactgagaagactgatatctgacgacacggctatctatttttgtctcactgcattagatggtgtcgcgtactggggccagggaacgctggtcaccgtctcctcacgcctccacc

SEQ ID NO: 528 - DNA, 348 bp, Homo sapiens; identical to SEQ ID NO: 526

SEQ ID NO: 529 - DNA, 366 bp, Homo sapiens
caggtgcagctggtgcagtctggggctgacgtgaagaagcctggggcctcagtgaaggtctcctgcaaggcctctggatataacttcatcacttactatatacattgggtgcgacaggcccctggacaagggcttgagtggatgggatgtatcaaccctaatagtggtggcacaaattatgcacagaggtttcaggacaaggtctccatgaccagggacacgtccatcagcacagcctacatggaactgagaagactgatatctgacgacacggctatctatttttgtctcactgcattagatggtgtcgcgtactggggccagggaacgctggtcaccgtctcctcacgcctccaccaacggccc

SEQ ID NO: 530 - DNA, 367 bp, Homo sapiens
caggtgcagctggtgcagtctgggactgacgtgcggaagcctggggcctcagtgaaggtctcctgcaaggcttctggatacaccttcaccgactactatattcactgggtgcgacaggcccctggacaacgtcttgagtggatgggatggttcaatcctaacactggtggcgcacactatggactggactatcagggcagagtcactatgaccggggacacgtccatgaccacagtctacatggagttgaccaggctggcatccgacgacacggccatttattattgtgcgagagaggactttgtagaactaccagctgccaatttgactacgtggggccagggaacgcgtggtcaccgtcttctca

SEQ ID NO: 531 - DNA, 349 bp, Homo sapiens
caggtgcagctggtgcagtctggggctgacgtgaagaagcctggggcctcagtgaaggtctcctgcaaggcctctggatataacttcatcacttactatatacattgggtgcgacaggcccctggacaagggcttgagtggatgggatgtatcaaccctaatagtggtggcacaaattatgcacagaggtttcaggacaaggtctccatgaccagggacacgtccatcagcacagcctacatggaactgagaagactgatatctgacgacacggctatctatttttgtctcactgcattagatggtgtcgcgtactggggccagggaacgcgtggtcaccgtctcctca

SEQ ID NO: 532 - DNA, 366 bp, Homo sapiens
caggtgcagctggtgcagtctggggctgagttgaagaagcctggggcctcagtgaaagtctcctgcaaggcttctggatacaccttcaccgccttctatatccactgggtgcgacaggcccctggacaagggcttgaatggatgggttggatcagccctgacagtggcaatacaaagtatgtggagaggttccagggcggggtcaccatgaccagggacacatccaccaacacagcctacatggagttgagcaggctgggacctgacgacacggccgtctattactgtatgaggataaatcgtggggcctactactttgaatactggggccagggaaccctggtcaccgtctcctcagcctccacc

SEQ ID NO: 533 - DNA, 348 bp, Homo sapiens
caggtgcagctggtgcagtctggggctgacgtgaagaagcctggggcctcagtgagggtctcctgcaaggcctctggatataacttcatcacttactatatacattgggtgcgacaggcccctggacaagggcttgagtggatgggatgtatcaaccctaatagtggtggcacaaattatgcacagaggtttcaggacaaggtctccatgaccagggacacgtccatcagcacagcctacatggaactgagaagactgatatctgacgacacggctatctatttctgtctcactgcattagatggtgtcgcgtactggggccagggaacgctggtcaccgtctcctca

SEQ ID NO: 534 - DNA, 331 bp, Homo sapiens
caggtgcagctggtgcagtctggggctgacgtgaagaagcctggggcctcagtgaaggtctcctgcaaggcctctggatataacttcatcacttactatatacattgggtgcgacaggcccctggacaagggcttgagtggatgggatgtatcaaccctaatagtggtggcacaaattatgcacagaggtttcaggacaaggtctccatgaccagggacacgtccatcagcacagcctacatggaactgagaagactgatatctgacgacacggctatctatttttgtctcactgcattagatggtgtcgcgtactggggccagggaacgc

SEQ ID NO: 535 - DNA, 360 bp, Homo sapiens
caggtgcagctggtgcagtctggggctgaggtgaagaagcctggggcctcagtgaaagtctcctgcaaggcttctggatatatcttcagcggccactacatgaactgggtgcgacaagcccctggacaaggtcttgagtggatgggatggatcaaccctgccagtggtggcacaagatatgcacagaggtttcaggacaaggtctccatgaccagggacacgtccatcagcacagcctacatggaactgagaagactgatatctgacgacacggctatctatttttgtctcactgcattagatggtgtcgcgtactggggccagggaacgctggtcaccgtctcctcacgcctccaccaa

SEQ ID NO: 536 - DNA, 363 bp, Homo sapiens
caggtgcagctggtgcagtctggggctgacgtgaagaagcctggggcctcagtgaaggtctcctgcaaggcctctggatataacttcatcacttactatatacattgggtgcgacaggcccctggacaagggcttgagtggatgggatgtatcaaccctaatagtggtggcacaaattatgcacagaggtttcaggacaaggtctccatgaccagggacacgtccatcagcacagcctacatggaactgagaagactgatatctgacgacacggctatctatttttgtctcactgcattagatggtgtcgcgtactggggccagggaacgctggtcaccgtctcctcacgcctccaccaacgg

SEQ ID NO: 537 - DNA, 358 bp, Homo sapiens; identical to SEQ ID NO: 527

SEQ ID NO: 538 - DNA, 348 bp, Homo sapiens; identical to SEQ ID NO: 533

SEQ ID NO: 539 - DNA, 376 bp, Homo sapiens
caggtgcagctggtgcagtctgggactgacgtgcggaagcctggggcctcagtgaaggtctcctgcaaggcttctggatacaccttcaccgactactatattcactgggtgcgacaggcccctggacaacgtcttgagtggatgggatggttcaatcctaacactggtggcgcacactatggactggactatcagggcagagtcactatgaccggggacacgtccatgaccacagtctacatggagttgaccaggctggcatccgacgacacggccatttattattgtgcgagagagggactttgtagaactaccagctgccaatttgactactggggccagggaacgctggtcaccgtcttctcagcctccacca

SEQ ID NO: 540 - DNA, 358 bp, Homo sapiens
caggtgcagctggtgcagtctgggaccgaggtgaagaagcctggggcctcagtgatggtcacctgcaaggcttctggatactccttcaacgactattatgtaaactgggtgcgacaggcccctggacaagggcttgagtggatgggatggatcaaccctaaaactggtgacacaaactatgcacggaagtttcagggcagggtcagtatgaccagggacacattcatcaacacagcctacatagacctgaacaaattgaaatctgacgacacggccgtttactactgtgcgatcggcagtggccaaccgtggctcttgatgtcgtggggccgagggacagttggtcaccgtctcttca

SEQ ID NO: 541 - DNA, 368 bp, Homo sapiens
caggtgcagctggtgcagtctggggctgacgtgaagaagcctggggcctcagtgaaggtctcctgcaaggcctctggatataacttcatcacttactatatacattgggtgcgacaggcccctggacaagggcttgagtggatgggatgtatcaaccctaatagtggtggcacaaattatgcacagaggtttcaggacaaggtctccatgaccagggacacgtccatcagcacagcctacatggaactgagaagactgatatctgacgacacggctatctatttttgtctcactgcattagatggtgtcgcgtactggggccagggaacgctggtcaccgtctcctcacgcctccaccaacgggccca

SEQ ID NO: 542 - DNA, 404 bp, Homo sapiens
caggtgcagctggtgcagtctggggctgacgtgaagaagcctggggcctcagtgaaggtctcctgcaaggcctctggatataacttcatcacttactatatacattgggtgcgacaggcccctggacaagggcttgagtggatgggatgtatcaaccctaatagtggtggcacaaattatgcacagaggtttcaggacaaggtctccatgaccagggacacgtccatcagcacagcctacatggaactgagaagactgatatctgacgacacggctatctatttttgtctcactgcattagatggtgtcgcgtactggggccagggaacgctggtcaccgtctcctcagcctccaccaagggcccatcggtcttccccctggccaccctcctccaacgacgcca

SEQ ID NO: 543 - DNA, 348 bp, Homo sapiens; identical to SEQ ID NO: 526

SEQ ID NO: 544 - DNA, 351 bp, Homo sapiens
caggtgcagctggtgcagtctggggctgacgtgaagaagcctggggcctcagtgagggtctcctgcaaggcctctggatataacttcatcacttactatatacattgggtgcgacaggcccctggacaagggcttgagtggatgggatgtatcaaccctaatagtggtggcacaaattatgcacagaggtttcaggacaaggtctccatgaccagggacacgtccatcagcacagcctacatggaactgagaagactgatatctgacgacacggctatctatttctgtctcactgcattagatggtgtcgcgtactggggccagggaacgcgtggtcaccgtctcctcacg

SEQ ID NO: 545 - DNA, 366 bp, Homo sapiens
caggtgcagctggtgcagtctgggactgacgtgcggaagcctggggcctcagtgaaggtctcctgcaaggcttctggatacaccttcaccgactactatattcactgggtgcgacaggcccctggacaacgtcttgagtggatgggatggttcaatcctaacactggtggcgcacactatggactggactatcagggcagagtcactatgaccggggacacgtccatgaccacagtctacatggagttgaccaggctggcatccgacgacacggccatttattattgtgcgagagagggactttgtagaactaccagctgccaatttgactactggggccagggaacgctggtcaccgtcttctca

SEQ ID NO: 546 - DNA, 393 bp, Homo sapiens
caggtgcagctggtgcagtctgggaccgaggtgaagaagcctggggcctcagtgatggtcacctgcaaggcttctggatactccttcaacgactattatgtaaactgggtgcgacaggcccctggacaagggcttgagtggatgggatggatcaaccctaaaactggtgacacaaactatgcacggaagtttcagggcagggtcagtatgaccagggacacattcatcaacacagcctacatagacctgaacaaattgaaatctgacgacacggccgtttactactgtgcgatcggcagtggccaaccgtgggctcttgatgtctggggccgagggacattggtcaccgtctcttcagcctccaccaggccatcggtctcccctgcgcctgct

SEQ ID NO: 547 - DNA, 366 bp, Homo sapiens
caggtgcagctggtgcagtctgggactgacgtgcggaagcctggggcctcagtgaaggtctcctgcaaggcttctggatacaccttcaccgactactatattcactgggtgcgacaggcccctggacaacgtcttgagtggatgggatggttcaatcctaacactggtggcgcacactatggactggactatcagggcagagtcactatgaccggggacacgtccatgaccacagtctacatggagttgaccaggctggcatccgacgacacggccatttattattgtgcgagagagggactttgagaactaccagctgccaatttgactacgtggggccagggaacgctggtcaccgtcttctca

SEQ ID NO: 548 - DNA, 358 bp, Homo sapiens; identical to SEQ ID NO: 527

SEQ ID NO: 549 - DNA, 376 bp, Homo sapiens
caggtgcagctggtgcagtctgggactgacgtgcggaagcctggggcctcagtgaaggtctcctgcaaggcttctggatacaccttcaccgactactatatacactgggtgcgacaggcccctggacaacgtcttgagtggatgggatggttcaatcctaacactggtggcgcacactatggactggactatcagggcagagtcacgatgaccggggacacgtccatcaccacagtctacatggagttgaccagactggcatccgacgacacggccatttattattgtgcgagagagggactttgagaactaccagctgccaatttgacttcgtggggccagggaacgcgtggtcaccgtcttctcagcctccacc

SEQ ID NO: 550 - DNA, 343 bp, Homo sapiens
caggtgcagctggtgcagtctggggctgacgtgaagaagcctggggcctcagtgaaggtctcctgcaaggcctctggatataacttcatcacttactatatacattgggtgcgacaggcccctggacaagggcttgagtggatgggatgtatcaaccctaatagtggtggcacaaattatgcacagaggtttcaggacaaggtctccatgaccagggacacgtccatcagcacagcctacatggaactgagaagactgatatctgacgacacggctatctatttttgtctcactgcattagatggtgtcgcgtactggggccagggaacgctggtcaccgtct

SEQ ID NO: 551 - DNA, 349 bp, Homo sapiens; identical to SEQ ID NO: 531

SEQ ID NO: 552 - DNA, 355 bp, Homo sapiens
caggtgcagctggtgcagtctggggctgacgtgaagaagcctggggcctcagtgaaggtctcctgcaaggcctctggatataacttcatcacttactatatacattgggtgcgacaggcccctggacaagggcttgagtggatgggatgtatcaaccctaatagtggtggcacaaattatgcacagaggtttcaggacaaggtctccatgaccagggacacgtccatcagcacagcctacatggaactgagaagactgatatctgacgacacggctatctatttttgtctcactgcattagatggtgtcgcgtactggggccagggaacgctggtcaccgtctcctcacgcctcc

SEQ ID NO: 553 - DNA, 402 bp, Homo sapiens
caggtgcagctggtgcagtctggggctgacgtgaagaagcctggggcctcagtgaaggtctcctgcaaggcctctggatataacttcatcacttactatatacattgggtgcgacaggcccctggacaagggcttgagtggatgggatgtatcaaccctaatagtggtggcacaaattatgcacagaggtttcaggacaaggtctccatgaccagggacacgtccatcagcacagcctacatggaactgagaagactgatatctgacgacacggctatctatttttgtctcactgcattagatggtgtcgcgtactggggccagggaacgctggtcaccgtctcctcagcctccaccaaggtccatcggtccttccccctcggccaccctcctccaacgacg

SEQ ID NO: 554 - DNA, 391 bp, Homo sapiens
caggtgcagctggtgcagtctggggctgacgtgaagaagcctggggcctcagtgagggtctcctgcaaggcctctggatataacttcatcacttactatatacattgggtgcgacaggcccctggacaagggcttgagtggatgggatgtatcaaccctaatagtggtggcacaaattatgcacagaggtttcaggacaaggtctccatgaccagggacacgtccatcagcacagcctacatggaactgagaagactgatatctgacgacacggctatctatttctgtctcactgcattagatggtgtcgcgtactggggccagggaacgctggtcaccgtctcctcacgcctccaccaacgggcccagtccggtccttcccccgtcggcc

SEQ ID NO: 555 - DNA, 350 bp, Homo sapiens
caggtgcagctggtgcagtctggggctgacgtgaagaagcctggggcctcagtgaaggtctcctgcaaggcctctggatataacttcatcacttactatatacattgggtgcgacaggcccctggacaagggcttgagtggatgggatgtatcaaccctaatagtggtggcacaaattatgcacagaggtttcaggacaaggtctccatgaccagggacacgtccatcagcacagcctacatggaactgagaagactgatatctgacgacacggctatctatttttgtctcactgcattagatggtgtcgcgtactggggccagggaacgctggtcaccgtctcctcacg

SEQ ID NO: 556 - DNA, 411 bp, Homo sapiens
caggtgcagctggtgcagtctggggctgacgtgaagaagcctggggcctcagtgaaggtctcctgcaaggcctctggatataacttcatcacttactatatacattgggtgcgacaggcccctggacaagggcttgagtggatgggatgtatcaaccctaatagtggtggcacaaattatgcacagaggtttcaggacaaggtctccatgaccagggacacgtccatcagcacagcctacatggaactgagaagactgatatctgacgacacggctatctatttttgtctcactgcattagatggtgtcgcgtactggggccagggaacgctggtcaccgtctcctcacgcctccaccaacgggcccatccggtccttccccctcggccaccctcctccaacgacgccacc

SEQ ID NO: 557 - DNA, 367 bp, Homo sapiens
caggtgcagctggttcagtctggggctgaagtgaagaagcctggggcctcggtgatggtctcctgcaaggcttctggatacaccttcactgactactatatttactgggtgcgacaggcccctgggcaagggcttgagtggatgggatggatcaaccctaacagaggtggcacaaagtatgcacagaagtttcaggggaggtcaccatgaccagggagacggccgtcgacacgggcctatttggaacttaacagcctgaaatctgacgacacggccgtctactactgtgccagactgcaaagccttcatgggttttactccaacgctgactactggggccagggaaccctggtccaccgtctcctca

SEQ ID NO: 558 - DNA, 440 bp, Homo sapiens
  misc_feature (420)..(420): n is a, c, g, or t
caggtgcagctggtgcagtctggggctgaggtgaagaagcctggggcctcagtgaaggtctcctgcagggcttctggatacaggttcaccggctactatgtccattgggtgcgacaggcccctggagaaggacttgagtggatgggatggatcaatcctaatgatggaaacacagtctattcacagaagtatcagggcagggtctccatgacctgggacatgtccatctacacagcctatatggagatgagtaggctgacatctgacgacacggccgtgtgttactgtgcgagagatcctagccccacgccgtattactatgatagtagtggttatcttagtggaggtatggacgtctggggccaagggaccacggtcaccgtctccgtcagggagtgcatccgcccaaccttttccccncgtctcctctgagacttccc

SEQ ID NO: 559 - DNA, 384 bp, Homo sapiens
caggtgcagctggtgcagtctgtgtctgaaattaagaaacttggggcctcagtgaaggtctcctgtaaggcttctggatatcccttcaccaactactttattcactgggtgcgacaggcccctggacaggggcttgagtggatggcgtggatcaaccctcacagtggtgagacacattatgcacagaagtttcagggcagggtcaccttgaccagggacacttccatcagcacagcctacatggacgtgagtgggctgagatctgacgacacggccctttattactgtgcgagggggtggaccatggtccaactgccaattgctacaagatattattactacatggatgtctggggcaaagggaccacggtcatcgtctcctca

SEQ ID NO: 560 - DNA, 436 bp, Homo sapiens
caggtgcagctggtgcagtctgggactgacgtgcggaagcctggggcctcagtgaaggtctcctgcaaggcttctggatacaccttcaccgactactatattcactgggtgcgacaggcccctggacaacgtcttgagtggatgggatggttcaatcctaacactggtggcgcacactatggactggactatcagggcagagtcactatgaccggggacacgtccatgaccacagtctacatggagttgaccaggctggcatccgacgacacggccatttattactgtgcgagagagggactttgtagaactaccagctgccaatttgactactggggccagggaacgctggtcaccgtcttctcacgcctccaccaacggcccatccggtcttccccctcggccaccctcctaccaacgacgcacctcgtcgggg

SEQ ID NO: 561 - DNA, 376 bp, Homo sapiens
caggtgcagctggtgcagtctgggactgacgtgcggaagcctggggcctcagtgaaggtctcctgcaaggcttctggatacaccttcaccgactactatatacactgggtgcgacaggcccctggacaacgtcttgagtggatgggatggttcaatcctaacactggtggcgcacactatggactggactatcagggcagagtcacgatgaccggggacacgtccatcaccacagtctacatggagttgaccagactggcatccgacgacacggccatttattattgtgcgagagagggactttgtagaactaccagctgccaatttgacttctggggccagggaacgctggtcaccgtcttctcacgcctccacc

SEQ ID NO: 562 - DNA, 348 bp, Homo sapiens; identical to SEQ ID NO: 526

SEQ ID NO: 563 - DNA, 365 bp, Homo sapiens
caggtgcagctggtgcagtctgggactgacgtgcggaagcctggggcctcagtgaaggtctcctgcaaggcttctggatacaccttcaccgactactatattcactgggtgcgacaggcccctggacaacgtcttgagtggatgggatggttcaatcctaacactggtggcgcacactatggactggactatcagggcagagtcactatgaccggggacacgtccatgaccacagtctacatggagttgaccaggctggcatccgacgacacggccatttattattgtgcgagagagggactttgtagaactaccagctgccaatttgactactggggccagggaacgctggtcaccgtcttctc

SEQ ID NO: 564 - DNA, 363 bp, Homo sapiens
caggtgcagctggtgcagtctgggactgacgtgcggaagcctggggcctcagtgaaggtctcctgcaaggcttctggatacaccttcaccgactactatattcactgggtgcgacaggcccctggacaacgtcttgagtggatggaatggttcaatcctaacactggtggcgcacactatggactggactatcagggcagagtcacgattaccacggacgaatccacgagcacagcctacatggagctgagcagcctgagatctgaggacacggccgtgtattactgtgcgagagtgagggggcgaaatagtggctacgaaagtatggacgtctggggccaagggaccacggtcaccgtctcc

SEQ ID NO: 565 - DNA, 366 bp, Homo sapiens
caggtgcagctggaacagtctgggcctgaagtgaagaagccgggggcctcagtgatggtctcctgcaaggcttctggatacaacttcatcgactactatatgtactgggtgcgacaggcccctggacaggggcctgagtggatgggatggatcaactctaatagaggtggcacaaagtatgctcagaagtttcagggaaggatcaccatgaccagggacacggccgtcagcacggcctatttggagctgaacaccctgagatctgacgacacggccgtctactactgtgcgagactacaaagccttcatggactgtattctaacgctgactattggggccagggaacactggtcaccgtctcctca

SEQ ID NO: 566 - DNA, 367 bp, Homo sapiens
caggtgcagctggtgcagtctggggctgaggtgaagaagcctggggcctcagtgaaggtctcctgcaagacttctggatacagtttcagcgactaccatgtgcactgggtgcgacaggccccgggacaaggtcttgactggatgggatggatcaaccagaatagtggtggcgcaacctatgcacagaagtttcagggcaggattgccatgacccgggacatgtccatcagcacagtcttcctggaactgagtagcctgagatttgacgacacggccatatactactgtgcgagagcccagaggccagtggcggacgcacttgagcttgaccattggggccagggaacgcgtggtcagcgtctcgtca

SEQ ID NO: 567 - DNA, 331 bp, Homo sapiens
caggtgcagctggtgcagtctggggctgacgtgaagaagcctggggcctcagtgaaggtctcctgcaaggcctctggatataacttcatcacttactatatacattgggtgcgacaggcccctggacaagggcttgagtggatgggatgtatcaaccctaatagtggtggcacaaattatgcacagaggtttcaggacaaggtctccatgaccagggacacgtccatcagcacagcctacatggaactgagaagactgatatctgacgacacggctatcttattttgtctcactgcattagatggtgtcgcgtactggggccagggaacgc

SEQ ID NO: 568 - DNA, 415 bp, Homo sapiens
caggtgcagctgctacagtctggggctgaggtgaagaagcctggggcctcagtgatggtctcctgcaaggcttctggatacacattcatcgactactacatatactgggtgaggcaggcccctggacaagggcctgagtggatggggtggatcaacactaacaggggtggcacaaagtatacacagaagtttcagggcagggtcaccctgaccagggacacggccgtcaccacggcctatctggagttgaacagcctgagatctgacgacacggccgtctattattgtgcgagactacaaagccttcatggactttattctaacgctgactactggggccagggaacgctggtcaccgtctcctcagcctccaccaacggcccatcggtcttccccctcggccaccctcctccaa

SEQ ID NO: 569 - DNA, 414 bp, Homo sapiens
caggtgcagctggttcagtctggggctgaggtgaagaagcctggggcctcagtgaaggtctcctgcaaggcctccggatacaccttcaccgccttctatctgcactgggtgcgacaggcccctggacgagggcttgagtggatggggtggatcaaccctatcaatggaggcacaatttactcagagaactttgagggcagggtcatcctgaccagggacacgtctaccagcacagcctacatggaactgagtggcctcagatctgacgactcggccgtatatttttgtgcgagagatgcgattccggtgactactgagtttgacttctggggccagggaacgctggtcagcgtctcccagcctccaccaaggcccatccggtcttcccccgtcggccaccctcctccaacgacg

SEQ ID NO: 570 - DNA, 371 bp, Homo sapiens
caggtgcagctggtgcagtctgggcctgaggtgaagaagcctggggcctcagtgaaagtctcctgcaaagcttctggatacaccttcaccgattattatatatactgggtgcgccagacccctggacaagggcttgagtggatgggatggatcaaccctaatcgagggggcacgaaatatgcgcagaagatgcagggcagggtcagcatgaccagggacacgtccatcaatacagtctacatggaactgagcgggctgacctctgacgacacggtccttttattactgtgcgagattacaaagtccttaatggttactactccaatgctgtacttttggggccagggaacgctggtcaccgtctcctcacg

SEQ ID NO: 571 - DNA, 366 bp, Homo sapiens
caggtgcagctggtgcagtctgggcctgaggtgaagaagcctggggcctcagtgaaagtctcctgcaaagcttctggatacaccttcaccgattattatatatactgggtgcgccagacccctggacaagggcttgagtggatgggatggatcaaccctaatcgagggggcacgaaatatgcgcagaagatgcagggcagggtcagcatgaccagggacacgtccatcaatacagtctacatggaactgagcgggctgacctctgacgacacggccttttattactgtgcgagattacaaagccttaatggttactactccaatgctgacttttggggccagggaacgctggtcaccgtctcctca

SEQ ID NO: 572 - DNA, 407 bp, Homo sapiens
caggtgcagctggtgcagtctggggctgaggtgaagaagcctggggcctcagtgatgctctcctgcaagacttctggatacaacttcatcgactactatatatactgggtgcgactggcccctggacgagggcttcagtggatgggatggataaaccctaacagaggtggcacaaagtatgcggagacctttcgggacaggctcaccatgaccagggacacgtccgtcagcacggcctatatggagctgaacaacctgagatctgacgacacggccgtctactactgtgcgagacttcaaagccttcatgggctttactctaacgctgactactggggccagggaacgctggtcaccgtctcctcagcctccaccaacgggcccactcggtccttccccctcggcca

SEQ ID NO: 573 - DNA, 379 bp, Homo sapiens
caggtgcagctggtgcagtctggggctgaggtgaagaagcctgggtcctcggtgaaggtctcctgcaaggcttctggatacaccttcaccgacttctatatacactgggtgcgacaggccccctggacaacgtcttgagtgggtgggatggtacaatcctaacactggtggcgcacactctggactggactttcagggcagagtcaccatgaccggggacacgtccatcagtacagtctacatggaactgcccaggctggcatctgacgacacggccatttattactgtgcgagagagggacattgtagtaccaccagctgcctattttgacttcgtggggccagggagcactggtcaccgtctcctcacgcctccacc

SEQ ID NO: 574 - DNA, 366 bp, Homo sapiens; identical to SEQ ID NO: 571

SEQ ID NO: 575 - DNA, 391 bp, Homo sapiens
caggtgcagctggtgcaatctggggctgaggtgaagaagcctggggcctcagtgaaggtctcctgcaaggcttctagatacacggtcaccggctattttatccactgggtgcgacaggcccctggacaagggctggagtggatgggttggatcaagcctaacagtgagagcacaaactatgcacagaagtttcgaggccgggtcaccatgaccggggacatgtccatcaacacagtctacatggagttgagaaggctgggatctgacgacacggccgtatattactgcgcttcatgcgaccggcgtggtgggcttgctacgatgtgcgaagggggggctactacgctatggacgtcgtggggccaagggaccacggtcatcgtctcctcag

SEQ ID NO: 576 - DNA, 364 bp, Homo sapiens
caggtgcagctggtgcagtctggggctgaggtaaagaagcctggggcctcggtgagggtctcctgcaaggcttctggatacacgttcaccgactactttgtacactgggtgcgacagacccctggacaaaattttgagtggatgggatggaccaacgtcaacactggtggcacaaagtatgcaccaaagtttcagggcagggtcaccatgaccagggacacgtccaacagcacagcctacattgaactgagcggcctgacatctgacgacacggccgtttattattgtacgagagatgagttgttccgtgttgatgatgcctttgatctgtggggccaagggacacgtggtcaccgtctcttca

SEQ ID NO: 577 - DNA, 413 bp, Homo sapiens
caggtgcagctggtgcagtctggggctgaggtaaagaagcctggggcctcggtgaaggtctcctgtaaggcttctggatacacgttcaccgactactttgtacactgggtgcgacaggcccctggacaaaattttgagtggatgggatggaccaacgtcaatactggtggcacaaagtatgcaccaaagtttcagggcagggtcaccatgaccagggacacgtccatcagtacagcctacattgaactgagcggcctgacatctgacgacacggccgtttattattgtacgagagatgagttgttccgtgttgatgatgcctttgatatgtggggccaagggacactggtgaccgtctcttcagcctccaccaagggcccatcggtccttccccctcggccaccctcctccaa

SEQ ID NO: 578 - DNA, 372 bp, Homo sapiens
caggtgcagctggtgcagtctggggctgaggtaaagaagcctggggcctcggtgaaggtctcctgcaaggcttctggatacacgttcaccgactactttgtacattgggtgcgacaggcccctggacaaaattttgagtggatgggatggaccaacgtcaacactggtggcacaaagtatgcaccaaagtttcagggcagggtcaccatgaccagggacacgtccatcagcacagcctacattgaactgagcggcctgacatctgacgatacggccatttattattgtacgagagatgaattgttccgtgttgatgatgcctttgatatgtggggccaagggacactggtcaccgtctcttcagcctccacc

SEQ ID NO: 579 - DNA, 421 bp, Homo sapiens
caggtgcagctggtgcagtctgggcctgaggtgaagaagcctggggcctcagtgaaagtctcctgcaaagcttctggatacaccttcaccgattattatatatactgggtgcgccaggcccctggacaagggcttgagtggatgggatggatcaaccctaatcgagggggcacgaaatatgcgcagaagatgcagggcagggtcagcatgaccagggacacgtccatcaatacagtctacatggaactgagcgggctgacctctgacgacacggccttttattactgtgcgagattacaaagccttaatggttactactccaatgctgacttttggggccagggaacgctggtcaccgtctcctcagcctccaccaagggcccatcggtccttccccctcggccaccctcctccaacgacg

SEQ ID NO: 580 - DNA, 372 bp, Homo sapiens
caggtgcagctggtgcagtctggggctgaggtaaagaagcctggggcctcggtgaaggtctcctgtaaggcttctggatacacgttcaccgactactttgtacactgggtgcgacaggcccctggacaaaattttgagtggatgggatggaccaacgtcaatactggtggcacaaagtatgcaccaaagtttcagggcagggtcaccatgaccagggacacgtccatcagtacagcctacattgaactgagcggcctgacatctgacgacacggccgtttattattgtacgagagatgagttgttccgtgttgatgatgcctttgatatgtggggccaagggacactggtgaccgtctcttcagcctccacc

SEQ ID NO: 581 - DNA, 412 bp, Homo sapiens
caggtgcagctggtgcagtctggggctgaggtgaagaagcctggggcctcagtgaaggtctcctgcaaggcctccggatacaccttcaccgccttctatctgcactgggtgcgacaggcccctggacgagggcttgagtggatggggtggatcaaccctatcaatggaggcacaatttactcagagaactttgagggcagggtcatcctgaccagggacacgtctaccagcacagcctacatggaactgagtggcctcagatctgacgactcggccgtatatttttgtgcgagagatgcgattccggtgactactgagtttgacttctggggccagggaacgctggtcagcgtctcccagcctccaccaaggcccatcggtcttccccctcggccaccctcctccaacgacg

SEQ ID NO: 582 - DNA, 363 bp, Homo sapiens
caggtgcagctggtgcagtctggggctgaggtaaagaagcctggggcctcggtgaaggtctcctgcaaggcttctggatacacgttcaccgactactttgtacattgggtgcgacaggcccctggacaaaattttgagtggatgggatggaccaacgtcaacactggtggcacaaagtatgcaccaaagtttcagggcagggtcaccatgaccagggacacgtccatcagcacagcctacattgaactgagcggcctgacatctgacgatacggccatttattattgtacgagagatgaattgttccgtgttgatgatgcctttgatatgtggggccaagggacactggtcaccgtctcttca

SEQ ID NO: 583 - DNA, 423 bp, Homo sapiens
caggtgcagctggtgcagtctggagctgaggtgaagaagcctggggcctcagtgaaggtctcctgcaaggcttctggttacacccttaccagctatggtatcagctgggtgcgacaggcccctggacaaggtcctgagtggctgggatggatcaaccctaaaagtggtgacacaaattatgcacagaagtttcagggcagagtcatgctgacaagggacacgtccatcaccacagtccacatggaggtgaacaggctcagatctgacgacacggccatgtattactgtgcgagagcgccctttgttcaggatagtggctacgattgggtgttcggccattggggccagggaacgctggtcaccgtctcctcagggagtgcatccgccccaacccttttcccctcgtctcctctgagaattccc

SEQ ID NO: 584 - DNA, 328 bp, Homo sapiens
caggtgcagctggtgcagtctggggctgacgtgaagaagcctggggcctcagtgaaggtctcctgcaaggcctctggatataacttcatcacttactatatacattgggtgcgacaggcccctggacaagggcttgagtggatgggatgtatcaaccctaatagtggtggcacaaattatgcacagaggtttcaggacaaggtctccatgaccagggacacgtccatcagcacagcctacatggaactgagaagactgatatctgacgacacggctatctattttgtctcactgcattagatggtgtcgcgtacgtggggccagggaa

SEQ ID NO: 585 - DNA, 454 bp, Homo sapiens
caggtgcagctggtgcagtctggggctgaggtaaagaagcctggggcctcggtgaaggtctcctgtaaggcttctggatacacgttcaccgactactttgtacactgggtgcgacaggcccctggacaaaattttgagtggatgggatggaccaacgtcaatactggtggcacaaagtatgcaccaaagtttcagggcagggtcaccatgaccagggacacgtccatcagtacagcctacattgaactgagcggcctgacatctgacgacacggccgtttattattgtacgagagatgagttgttccgtgttgatgatgcctttgatatgtggggccaagggacactggtgaccgtctcttcagcctccaccaaggcccatccggtcttccccctggccaccctcctccaagacgcacctcgtggggcacagcagccctgggctgcctggtcaa

SEQ ID NO: 586 - DNA, 363 bp, Homo sapiens
caggtgcagctggtgcagtctggggctgaggtaaagaagcctggggcctcggtgaaggtctcctgtaaggcttctggatacacgttcaccgactactttgtacactgggtgcgacaggcccctggacaaaattttgagtggatgggatggaccaacgtcaatactggtggcacaaagtatgcaccaaagtttcagggcagggtcaccatgaccagggacacgtccatcagtacagcctacattgaactgagcggcctgacatctgacgacacggccgtttattattgtacgagagatgagttgttccgtgttgatgatgcctttgatatgtggggccaagggacacgtggtgaccgtctcttc

SEQ ID NO: 587 - DNA, 380 bp, Homo sapiens
caggtgcagctggtgcagtctggggctgaggtgaagaagcgtggggcctcagtgaaggtctcctgtaaggcttctggaaactttttcaccggctataatatacactgggtgcgacaggcctctggacaagggctcgagtggatgggatggatcaaccctgacaatggtgccacaaaatatgcacaggggtttcagggcagggtcaccatgaccagggacacgtccatcaaaacaacctacatggaattgagtcggctgacatctgacgacacggccgtctattattgtacaagagcaattggttcggggagttattataacggggaggaaaagcattactttctctattggggccagggaacgctggtcaccgtctcctc

SEQ ID NO: 588 - DNA, 381 bp, Homo sapiens
caggtgcagctggtgcagtctggggctgaggtaaagaagcctggggcctcggtgaaggtctcctgtaaggcttctggatacacgttcaccgactactttgtacactgggtgcgacaggcccctggacaaaattttgagtggatgggatggaccaacgtcaatactggtggcacaaagtatgcaccaaagtttcagggcagggtcaccatgaccagggacacgtccatcagtacagcctacattgaactgagcggcctgacatctgacgacacggccgtttattattgtacgagagatgagttgttccgtgttgatgatgcctttgatatgtggggccaagggacactggtgaccgtctcttcagcctccaccaacggccca

SEQ ID NO: 589 - DNA, 363 bp, Homo sapiens
caggtgcagctggtgcagtttggaggtgaggtgaagaagcctgggtcctcggtgaaggtctcctgcaaggcttctggatacacgttcaccgactactttgtacactgggtgcgacaggcccctggacaaaattttgagtggatgggatggaccaacgtcaacactggtggcacaaagtatgcaccaaagtttcagggcagggtcaccatgaccagggacacgtccatcagcacagcctacattgaactgagcggcctgacatctgacgacacggccgtttattattgtacgagagatgaattgttccgtgttgatgatgcctttgatatgtggggccaagggacacgtggtcaccgtctcttc

SEQ ID NO: 590 - DNA, 362 bp, Homo sapiens
caggtgcagctggtgcagtctggggctgaggtgaagaagcctggggcctcagtgaaggtctcctgcaaggcttctggatacaccttcaccgacttctatatacactgggtgcgacaggcccctggacaacgtcttgagtgggtgggatggtacaatcctaacactggtggcgcacactctggactggactttcagggcagagtcaccatgaccggggacacgtccatcagtacagtctacatggaactgcccaggctggcatctgacgacacggccatttattactgcgcgagagaacgtatggcgactggtactgcgatctcgtggggccgcggcaccctggtcactgtctcctcacgcct

SEQ ID NO: 591 - DNA, 366 bp, Homo sapiens
caggtgcagctggtgcagtccggggctgaggtgaggaagcctggggcctcagtgaagatttcctgtcagacttctggatacacgttcagcgactactttctccactgggtgcgacaggcccctggacaagggcttgagtggatggcatggatcaaccctactaatggtgacacaaactttgcacagacgtttcagggcggggtcaccgtgaccagggacacgtccattagcacagtctacatggagctcagcagtctgaagtctgacgacacggccgtgtatttctgtgcgagaggagtccggcgctatagtggcagctggtacttggggtactggggccagggaaccctggtcaccgtctcctca

SEQ ID NO: 592 - DNA, 376 bp, Homo sapiens
caggtgcagctggtgcagtctggggctgaagtaaagaaacctggggcctcggtgaaggtctcctgcaaggcttctggatacacgttcaccgactactttgtacactgggtgcgacaggcccctggacaaaattttgagtggatgggatggaccaacgtcaacactggtggcacaaagtatgccccaaagtttcagggcagggtcatcatgaccagggacacgtccatcagcacagcctacattgaactgagcggcctgacatctgacgacacggccgtttattactgtacgagagatgagttgttccgtgttgatgatgcctttgatatgtggggccaagggacactggtcaccgtctcttcacgcctccaccaac

SEQ ID NO: 593 - DNA, 362 bp, Homo sapiens
caggtgcagctggtgcagtctggggctgaggtaaagaagcctggggcctcggtgagggtctcctgcaaggcttctggatacacgttcaccgactactttgtacattgggtgcgacaggcccctggacaaaattttgagtggatgggatggaccaacgtcaacactggtggcacaaagtatgcaccaaagtttcagggcagggtcaccatgaccagggacacgtccatcagcacagcctacattgaactgagcggcctgacatctgacgacacggccatttattattgtacgagagatgaattgttccgtgttgatgatgcctttgatatgtggggccaagggcactggtcaccgtctcttca

SEQ ID NO: 594 - DNA, 365 bp, Homo sapiens
caggtgcagctggtgcagtctggggctgaggtgaagaagcctggggcctcagtgaaggtctcctgcaaggcttctggatacaccttcaccgcctactatttgaactgggtgcgacaggcccctggacaagggcttgagtgggtgggatggatcaatcctaacagtggtgtcacaatctatgcagaggcttttgagggcagggtcaccgtaaccacggacacgtccatgaaaacagtctacatggagttggagagcctgacatctggcgacacggccatgtatttctgcgccagagatgcgactccgataactacggaatttgactactggggccagggaacactgatcaccgtctcctcacgcct

SEQ ID NO: 595 - DNA, 378 bp, Homo sapiens
caggtgcagctggtgcagtctgggcctgaggtgaagaagcctggggcctcagtgaaggtctcctgtaaggcctctggatacactcgcaacacctactatgtgcactgggtgcgacaggcccctggacaaggtcttgagtggatgggatggatcaaccctaacagtggtggcacaaattatgcacacaagtttcaaagtagggtcaccatgaccagggacacgtccatctctacattctacatggagttgagcggactgacatctgacgacacggccatctattactgtgcgactgatttcgacggggggaatttcctttattactttgactcctggggtccagggaacggtgctcaccgtctcctcagcctccaccaa

SEQ ID NO: 596 - DNA, 360 bp, Homo sapiens
caggtgcagctggtgcagtctggggctgaagtgaagaagcctggggcctcagtgaaggtctcctgcaaggcttctggatacaccttcaccgactactatattcactgggtgcgacaggcccctggacaacgtcttgagtggatgggatggttcaatcctaacactggtggcgcacactatggactggactatcagggcagagtcactatgaccggggacacgtccatgaccacagtctacatggagttgaccaggctggcatccgacgacacggccatttattattgtgcgagagagggactttgtagaactaccagctgccaatttgactactggggccagggaacgctggtcaccgtc

SEQ ID NO: 597 - DNA, 366 bp, Homo sapiens
caggtgcagctggtgcagtctggggctgaggtgaagaagcctggggcctcagtgatggtctcctgcaaggcttctggatacacattcatcgactactacatatactgggtgaggcaggcccctggacaagggcctgagtggatggggtggatcaacactaacaggggtggcacaaagtatgcacagaagtttcagggcagggccaccctgaccagggacacggccgtcaccacggcctatctggagttgaacagcctgagatctgacgacacggccgtctattattgtgcgagactacaaagccttcatggactttattctaacgctgactactggggccagggaacgctggtcaccgtctcctca

SEQ ID NO: 598 - DNA, 374 bp, Homo sapiens
  misc_feature (318)..(318): n is a, c, g, or t
caggtgcagctggtgcagtctgggcctgaagtgaagaagccgggggcctcagtgatggtctcctgcaaggcttctggatacaccttcatcgactactatatttactgggtgcgacaggcccctggacaggggcttgagtggatgggatggatcaacccgaacagaggtggcacaaagtatgctcagaactttcagggaagggtcaccatgaccagggacacggccgtcagcacggcctatatggagctgaactccgtgagatctgacgacacggccgtctactacttgcgagactacaaagccttcatgggctttacnctaacgctgactacgtggggccagggaacgctcggtcaccgtctcctcacgcctcc

SEQ ID NO: 599 - DNA, 367 bp, Homo sapiens
caggtgcagctggtgcagtctggggctgaggtaaagaagcctggggcctcggtgaaggtctcctgcaaggcttctggatacacgttcaccgactactttgtacattgggtgcgacaggcccctggacaaaattttgagtggatgggatggaccaacgtcaacactggtggcacaaagtatgcaccaaagtttcagggcagggtcaccatgaccagggacacgtccatcagcacagcctacattgaactgagcggcctgacatctgacgacacggccatttattattgtacgagagatgaattgttccgtgttgatgatgtcctttgatagtggtggggccaagggacacgtggtcaccgtctcttca

SEQ ID NO: 600 - DNA, 417 bp, Homo sapiens
  misc_feature (398)..(398): n is a, c, g, or t
caggtgcagctggtgcagtctgggcctgaagtgaagaagccgggggcctcagtgatggtctcctgcaaggcttctggatacaccttcatcgactactatatatactgggtgcgacaggcccctggacaggggcttgagtggatgggatggatcaacccgaacagaggtggcacaaagtatgctcagaactttcagggaaggatcaccatgaccagggacacggccgtcagcacggcctatatggagctgaactccctgagatttgacgacacggccgtctactactgtgcgagactacaaagccttcatgggctttactctaacgctgactactggggccagggaacgctggtcaccgtctcctcagggagtgcatccgccccaacccttttcccccncgtctcctctgagaattcc

SEQ ID NO: 601 - DNA, 346 bp, Homo sapiens
caggtgcagctggtgcagtctggggctgaggtaaagaagcctggggcctcggtgaaggtctcctgcaaggcttctggatacacgttcaccgactactttgtacaccgggtgcgacaggcccctggacaaaattttgagtggatgggatggaccaacgtcaacactggtggcacaaactatgcaccaaggtttcagggcagagtcaccatgaccagggacacgtccatcagcacagcctacattgaactgagcggcctgacatctgacgacacggccgtttattattgtacgagagatgagttgttccgtgttgatgatgcctttgatatgtggggccaagggacac

SEQ ID NO: 602 - DNA, 376 bp, Homo sapiens
caggtgcagctggtgcagtctgggcctgaagtgaagaagccgggggcctcagtgatggtctcctgcaaggcttctggatacaacttcatcgactactatatgtactgggtgcgacaggcccctggacaggggcctgagtggatgggatggatcaactctaatagaggtggcacaaagtatgctcagaagtttcagggaaggatcaccatgaccagggacacggccgtcagcacggcctatttggagctgaacaccctgagatctgacgacacggccgtctactactgtgcgagactacaaagccttcatggactgtattctaacgctgactattggggccagggaacgctggtcaccgtctcctcacgcctccacc

SEQ ID NO: 603 - DNA, 375 bp, Homo sapiens
caggtgcagctggtgcagtctggggctgaagtgaggaagcctggggcctcagtgaaggtttcctgtaaggcttctggatacacatttaccgactactttatacactgggtgcgacaggcccctggacaagggcttgagtggatggggaggatcaaccctaaaagtggaggcacaaattatgcacagaaatttcaaatttcggtcaccatgacctgggacacatccatcagtacagcctacatagaggtgaacaggctgacatctgacgacacggccgtgtattactgtgcgagaggggaccggctagctccctataatagccgagtgcgatatttcgatctctggggccgcggcactctggtcactgtctcctca

SEQ ID NO: 604 - DNA, 428 bp, Homo sapiens
caggtgcagctggaacagtctgggcctgaagtgaagaagccgggggcctcagtgatggtctcctgcaaggcttctggatacaacttcatcgactactatatgtactgggtgcgacaggcccctggacaggggcctgagtggatgggatggatcaactctaatagaggtggcacaaagtatgctcagaagtttcagggaaggatcaccatgaccagggacacggccgtcagcacggcctatttggagctgaacaccctgagatctgacgacacggccgtctactactgtgcgagagaatcgattgtagtggtggtagctgcttccacttactcctacggtatggacgtctggggccaagggaccacggtcaccgtctcctcagggagtgcatccgccccaacccttttccccctcgtcctcctctgacg

SEQ ID NO: 605 - DNA, 372 bp, Homo sapiens
caggtgcagctggtgcagtctggggctgaagtaaagaagcctggggcctcggtgaaggtctcctgcaaggcttctggatacacgttcaccgactactttgtacactgggtgcgacaggcccctggacaaaatcttgagtggatggggtggaccaacgtcaacactggtggcacaaattatgcaccaaagtttcagggcagggtcaccatgaccagggacacgtccatcagcacagcctacattgaactgagcggcctgacatctgacgacacggccgtttattattgtacgagagatgaattgttccgtgttgatgatgcctttgatatgtggggccaagggacactggtcaccgtctcttcagcctccacc

SEQ ID NO: 606 - DNA, 385 bp, Homo sapiens
caggtgcagctggtgcagtctggggctgaggtgaagaagcctggggcctcagtgaaggtctcctgcaaggcttctggatacagcttcagcgacttctatatacactgggtgcgacaggcccctggacaacgtcttgagtggatgggatggttcaaccctaacactggtggcgcacactctggactggactttcaggacagagtcaccatgaccggggacacgtccatcagcacagcctacatggaactgcccaggctggcatctgacgacacggccatttattactgtgcgagagagggacattgtcctaccaccagctgccattttgacttctggggccagggagcactggtcaccgtctcctcagcctccaccaacgggccca

SEQ ID NO: 607 - DNA, 365 bp, Homo sapiens
caggtgcagctggtgcagtctggggctgaggtgaagaagcctggggcctcagtgaacgtctcctgcaaggcttctgaatacactttcaccacatattacttgcattgggtgcgacaggcccctggacaaggtcttgagtgggtaggttggatcaaccctaaagatggtggcacaaagtatgcacagaaatttcagggcagggtcaccatgaccagggacacgtccatcaccacagcctacatggaattaagcagcctcaaatctgacgacacggccatgtatttctgtgccagagatctcggacatttatcatcagctggaacttatgccttctggggccagggaaccctggtcaccgtctcctc

SEQ ID NO: 608 - DNA, 381 bp, Homo sapiens
caggtgcagctggtgcagtctggggctgaggtgaagaagcgtggggcctcagtgaaggtctcctgtaaggcttctggaaactttttcaccggctataatatacactgggtgcgacaggcctctggacaagggctcgagtggatgggatggatcaaccctgacaatggtgccacaaaatatgcacaggagtttcagggcagggtcaccatgaccagggacacgtccatcaaaacaacctacatggaattgagtcggctgacatctgacgacacggccgtctattattgtacaagagcaattggttcggggagttattataacggggaggaaaagcattactttctctattggggccagggaacgctggtcaccgtctcctca

SEQ ID NO: 609 - DNA, 375 bp, Homo sapiens
caggtgcagctggtgcagtctggggctgaggtaaagaagcctggggcctcggtgagggtctcctgcaaggcttctggatacacgttcaccgactactttgtacactgggtgcgacaggcccctggacaaaattttgagtggatgggatggaccaacgtcaacactggtggcacaaagtatgcaccaaagtttcagggcagggtcaccatgaccagggacacgtccaacagcacagcctacattgaactgagcggcctgacatctgacgacacggccgtttattattgtacgagagatgagttgttccgtgttgatgatgcctttgatctgtggggccaagggacactggtcaccgtctcttcagcctccaccaac

SEQ ID NO: 610 - DNA, 411 bp, Homo sapiens
caggtgcagctggtgcagtctggggctgaagtaaagaagcctggggcctcggtgaaggtctcctgcaaggcttctggatacacgttcaccgactactttgtacactgggtgcgacaggcccctggacaaaattttgagtggatggggtggaccaacgtcaacactggtggcacaaattatgcaccaaagtttcagggcagggtcaccatgaccagggacacgtccatcagcacagcctacattgaactgagcggcctgacatctgacgacacggccgtttattattgtacgagagatgaattgttccgtgttgatgatgcctttgatatgtggggccaagggacactggtcaccgtctcttcagcctccaccaacggccatcgtcttcccctcggccaccctcctccaaga

SEQ ID NO: 611 - DNA, 425 bp, Homo sapiens
caggtgcagctggtgcagtctggggctgaggtaaagaagcctggggcctcggtgaaggtctcctgcaaggcttctggatacacgttcaccgactactttgtacattgggtgcgacaggcccctggacaaaattttgagtggatgggatggaccaacgtcaacactggtggcacaaagtatgcaccaaagtttcagggcagggtcaccatgaccagggacacgtccatcagcacagcctacattgaactgagcggcctgacatctgacgacacggccatttattattgtacgagagatgaattgttccgtgttgatgatgcctttgatatgtggggccaagggacactggtcaccgtctcttcagcctccaccaacgggcccactccggtcttccccctcggccgccctgcctccaacgacgcacc

SEQ ID NO: 612 - DNA, 441 bp, Homo sapiens
caggtgcagctggtgcagtctgggactgacgtgcggaagcctggggcctcagtgagggtctcctgcaaggcttctggatacaatttcaccggctactttatccactgggtgcgacagggccctggacaagggcttgagtggatgggatgggtgaacccaaacaccggtggcgcaaagtatgcacagaagtttcagggcagggtcaccatgaccagggacacatccatcagaacagcctacatggaactgagcagcctaaaacccggcgacacggccgtttattattgtgcgcgagacccccaagacggcactacttggtacacgcactggggccagggaacactggtcaccgtctcctcagcctccaccaagggcccatcggtcttcccctggcaccctcctccaagagcacctctgggggcacagcggccctgggctgcc

SEQ ID NO: 613 - DNA, 375 bp, Homo sapiens
caggtgcagctggtgcagtctggggctgaggtgaggaagcctggggcctcactgagggtctcctgcaaggcttctggatacattttcagcgactaccatctacactgggtgcgacaggccccgggacaagggcttgagtggatggggtggatcaaccataatagtggtggcgcaacctatgcacagaaatttcagggcaggattgccatgaccagggacacgtccatcgacacagccttcctggaactgagtaggctgagatttgacgacacggccgtatattactgtgcgagagcccagaggccagtggcggacgcacttgaacttgaccattggggccagggaacgctggtcagcgtctcgtcagcctccacc

SEQ ID NO: 614 - DNA, 366 bp, Homo sapiens
caggtgcagctggtgcagtctggggctgaggtaaagaagcctggggcctcggtgaaggtctcctgcaaggcttctggatacacgttcaccgactactttgtacattgggtgcgacaggcccctggacaaaattttgagtggatgggatggaccaacgtcaacactggtggcacaaagtatgcaccaaagtttcagggcagggtcaccatgaccagggacacgtccatcagcacagcctacattgaactgagcggcctgacatctgacgacacggccatttattattgtacgagagatgaattgttccgtgttgatgatgcctttgatatgtggggccaagggacactggtcaccgtctcttcagcc

SEQ ID NO: 615 - DNA, 365 bp, Homo sapiens
caggtgcagctggtgcagtctggggctgaggtgaggaagcctggggcctcactgagggtctcctgcaaggcttctggatacattttcagcgactaccatctacactgggtgcgacaggccccgggacaagggcttgagtggatggggtggatcaaccataatagtggtggcgcaacctatgcacagaaatttcagggcaggatcgccatgaccagggacacgtccatcgacacagccttcctggaactgagtaggctgagatttgacgacacggccgtatattactgtgcgagagcccagaggccagtggcggacgcacttgaacttgaccattggggccagggaacgctggtcagcgtctcgtc

SEQ ID NO: 616 - DNA, 366 bp, Homo sapiens
caggtgcagctggtgcagtctgggaccgaggtgaagaagcctggggcctcagtgatggtcacctgcaaggcttctggatactccttcaacgactattatgtaaactgggtgcgacaggcccctggacaagggcttgagtggatgggatggatcaaccctaaaactggtgacacaaactatgcacggaagtttcagggcagggtcagtatgaccagggacacattcatcaccacagcctacttggaactgaacagtctgacatctgacgacacggccgtctattactgtgtgagaggtgcgcgggggatgccgaaaggtgcttttgatatctggggccaagggacactggtcattgtctcttcagcc

SEQ ID NO: 617 - DNA, 429 bp, Homo sapiens
caggtgcagctggtgcagtctgggcctgaagtgaagaagccgggggcctcagtgatggtctcctgcaaggcttctggatacaccttcatcgactactatatttactgggtgcgacaggcccctggacaggggcttgagtggatgggatggatcaacccgaacagaggtggcacaaagtatgctcagaactttcagggaagggtcaccatgaccagggacacggccgtcagcacggcctatatggagctgaactccgtgagatctgacgacacggccgtctactactgtgcgagactacaaagccttcatgggctttactctaacgctgactactggggccagggaacgctggtcaccgtctcctcacgcctccaccaacgggcccatccggtccttcccccgtcggccaccctcctcccaacgacgcca

SEQ ID NO: 618 - DNA, 363 bp, Homo sapiens
caggtgcagctggtgcagtctggggctgaggtaaagaagcctggggcctcggtgaaggtctcctgcaaggcttctggatacacgttcaccgactactttgtacactgggtgcgacaggcccctggacaaaattttgagtggatgggatggaccaacgtcaacactgttggcacaaagtatgcaccaaagtttcagggcagggtcaccatgaccagggacacgtccatcagcacagcctacattgaactgagcggcctgacatctgacgacacggccgtttattattgtacgagagatgagttgttccgtgttgatgatgcctttgatatgtggggccaagggacactggtcaccgtctcttca

SEQ ID NO: 619 - DNA, 379 bp, Homo sapiens
caggtgcagctggtgcagtctggggttgaggtgaagaaacctggggcctcaatgaaggtctcctgcaaggcttctggatacaatttcaccggctactttatccactgggtgcgacatggccctggacaagggcttgagtggatgggatggatgaacccaaacaccggtggcgcaaagtatggacagaagtttcagggcagggtcaccatgaccagggacacatccatcagaacagcctacatggaactgagcagcctaaaacccggcgacacggccgtttattattgtgcgcgagacccccaagacggcactacttggtacacgcactggggccagggaacactggtcaccgtctcctcagcctccaccaacgggccca

SEQ ID NO: 620 - DNA, 374 bp, Homo sapiens
caggtgcagctggtgcagtctggggctgaggtgaagaagcctggggcctcagtgaaggtctcctgcaaggcttctggatacaccttcaccgacttctatatacactgggtgcgacaggcccctggacaacgtcttgagtgggtgggatggtacaatcctaacactggtggcgcacactctggactggactttcagggcagagtcaccatgaccggggacacgtccatcagtacagtctacatggaactgcccaggctggcatctgacgacacggccatttattactgtgcgagagagggacattgtagtaccaccagctgccattttgacttctggggccagggagcactggtccaccgtctcctcacgcctcc

SEQ ID NO: 621 - DNA, 377 bp, Homo sapiens
caggtgcagctggtgcggtctggggctgagatgaagaagcctggggcctcagtgaaggtctcctgcaagacttctggatacacctttaccgactactatttccactggctgcgacaggccccctggacaagggcttgagtggatgggatggctcgtccctaacactggtggcacaaactatgcactaaattttcagggcaggtcgccatgaccagggacacgtccatcagcacagtctacatggaattgcgtcgcctcagatctgacgacacggccgtctattattgtgtgagagacggcggccggcggttgggcggcagctggtacccaaattttgacaagtggggaccagggaacacttatcaccgtctcctcag

SEQ ID NO: 622 - DNA, 377 bp, Homo sapiens
  misc_feature (348)..(348): n is a, c, g, or t
caggtgcagctggtacagtctgggcctgaggtgaagaagccgggggcctcagtgatggtctcctgcaaggcttctggatacaccttcatcgactactatatttactgggtgcgacaggcccctggacaggggcttgagtggatgggatggatcaacccgaacagaggtggcacaaagtatgctcagaactttcagggaagggtcaccatgaccagggacacggccgtcagcacggcctatatggagctgaactccgtgagatctgacgacacggccgtctactactgtgcgagactacaaagccttcatgggctttactctaacgctgactactggggccagggaacnctggcccaccgtctcctcacgcctccacc

SEQ ID NO: 623 - DNA, 475 bp, Homo sapiens
caggtgcagctggtgcagtctggggctgaggtgaggaagcctggggcctcagtgaaggtctcctgcaaggcttctggatacaccttcaccgactactacatccactgggtgcgacaggtccctggacaggggcttgagtggataggatggatccaccctaacagtggtagagcaacccatacacagaagtttcagggcagggtcaccatgaccagtggcacgtctatcagtacagtctacatggaacttactgggctgacacctgacgacacggccgtctattattgtgcgagagacaattatcggaataacgtctgggtcctctatacctttgactactggggccagggaacgctggtcaccgtctcctcagcctccaccaagggcccatcggtcttccccctggcaccctcctccaagagcacctctggggcacagcagccctgggctgcctggtcaaggactacttcccgaa

SEQ ID NO: 624 - DNA, 364 bp, Homo sapiens
caggtgcagctggtgcagtctggggctgaagtaaagaagcctggggcctcggtgaaggtctcctgcaaggcttctggatacacgttcaccgactactttgtacactgggtgcgacaggcccctggacaaaattttgagtggatgggatggaccaacgtcaacactggtggcacaaattatgcaccaaagtttcagggcagggtcaccatgaccagggacacgtccatcagcacagcctacattgaactgagcggcctgacatctgacgacacggccgtttattattgtacgagagatgaattgttccgtgttgatgatgcctttgatatgtggggccaagggacacgtggtcaccgtctcttca

SEQ ID NO: 625 - DNA, 366 bp, Homo sapiens
caggtgcagctggtgcagtctgggcctgaagtgaagaagccgggggcctcagtgatggtctcctgcaaggcttctggatacaccttcatcgactactatatttactgggtgcgacaggcccctggacaggggcttgagtggatgggatggatcaacccgaacagaggtggcacaaagtatgctcagaactttcagggaagggtcaccatgaccagggacacggccgtcagcacggcctatatggagctgaactccgtgagatctgacgacacggccgtctactactgtgcgagactacaaagccttcatgggctttactctaacgctgactactggggccagggaacgctggtcaccgtctcctca

SEQ ID NO: 626 - DNA, 426 bp, Homo sapiens
caggtgcagctggtgcagtctgggcctgaagtgaagaagccgggggcctcagtgatggtctcctgcaaggcttctggatacaccttcatcgactactatatatactgggtgcgactggcccctggacaggggcttgagtggatgggatggatcaaccctaatagaggtggcacaaagtatgctcagaagtttcagggaaggatcaccatgaccagggacacggccgtcagcacggcctatatggagctgaccaccctgagatctgacgacacggccatgtactattgtgcgagactacaaagccttcatgggctttactctaacgctgactactggggccagggaacgctggtcaccgtctcctcacgccccacacggccactcgtctcccctcgcaccctcctccacgacgcacctcgtcggggc

SEQ ID NO: 627 - DNA, 427 bp, Homo sapiens
caggtgcagctggtgcagtctggggctgaggtgaggaagcctggggcctcagtgaaggtctcctgcaaggcttctggatacaccttcaccgactactacatccactgggtgcgacaggtccctggacaggggcttgagtggataggatggatccaccctaacagtggtagagcaacccatacacagaagtttcagggcagggtcaccatgaccagtggcacgtctatcagtacagtctacatggaacttactgggctgacacctgacgacacggccgtctattattgtgcgagagacaattatcggaataacgtctgggtcctctatacctttgactactggggccagggaacgctggtcaccgtctcctcagcctccaccaacgggcccatccggtcttcccctcggccaccctcctccaacgacg

SEQ ID NO: 628 - DNA, 372 bp, Homo sapiens
caggtgcagctggtgcagtctggggctgaggtaaagaagcctggggcctcggtgaaggtctcctgcaaggcttctggatacacgttcaccgactactttgtacactgggtgcggcaggcccctggacaaaattttgagtggatgggatggaccaacgtcaacactggtggcacaaattatgcaccaaagtttcagggcagggtcaccatgaccagggacacgtccatcagcacagcctacattgaactgagcggcctgacatctgacgacacggccgtttattattgtacgagagatgaattgttccgtgttgatgatgcctttgatatgtggggccaagggacactggtcaccgtctcttcagcctccacc

SEQ ID NO: 629 - DNA, 372 bp, Homo sapiens
caggtgcagctggtgcagtctggggctgaggtgaggaagcctggggcctcagtgaaggtctcctgcaaggcttctggatacaccttcaccgactactacatccactgggtgcgacaggtccctggacaggggcttgagtggataggatggatccaccctaacagtggtagagcaacccatacacagaagtttcagggcagggtcaccatgaccagtggcacgtctatcagtacagtctacatggaacttactgggctgacacctgacgacacggccgtctattattgtgcgagagacaattatcggaataacgtctgggtcctctatacctttgactactggggccagggaacgctggtcaccgtctcctca

SEQ ID NO: 630 - DNA, 426 bp, Homo sapiens
caggtgcagctggtgcagtctggggctgaggtgaggaagcctggggcctcagtgaaggtctcctgcaaggcttctggatacaccttcaccgactactacatccactgggtgcgacaggtccctggacaggggcttgagtggataggatggatccaccctaacagtggtagagcaacccatacacagaagtttcagggcagggtcaccatgaccagtggcacgtctatcagtacagtctacatggaacttactgggctgacacctgacgacacggccgtctattattgtgcgagagacaattatcggaataacgtctgggtcctctatacctttgactactggggccagggaacgctggtcaccgtctcctcagcctccaccaagggcccatccggtcttccccctggccaccctcctccaacgacg

SEQ ID NO: 631 - DNA, 366 bp, Homo sapiens
caggtgcagctggtgcactctggggctgaggtgaagaagcctggggcctccgtgaaggtctcctgtcagacttctggatacacgttcagcgactactttctccactgggtgcgacaggcccctggacaaggacttgagtggatggcatggatcaaccctactaatggtgacacaaactttgcacagacgtttcagggcagggtcaccgtgaccagggacacgtccattagcacagtctacatggagctcagcagtctgaagtctgacgacacggccgtgtatttctgtgcgagaggagtccggcgctatagtggcagctggtacttggggtactggggccagggaaccctggtcaccgtctcctca

SEQ ID NO: 632 - DNA, 366 bp, Homo sapiens
caggtgcagctggtgcagtctggggcagaggtgaagaagcctggggcctcagtgaaggtctcctgcaaggcttctggatacacattcatcgactactacatatactgggtgaggcaggcccctggacaagggcctgagtggatggggtggatcaacactaacaggggtggcacaaagtatgcacagaagtttcagggcagggtcaccctgaccagggacacggccgtcaccacggcctatctggagttgaacagcctgagatctgacgacacggccgtctattattgtgcgagactacaaagccttcatggactttattctaacgctgactactggggccagggaacgctggtcaccgtctcctca

SEQ ID NO: 633 - DNA, 349 bp, Homo sapiens
caggtgcagctggtgcagtctgggcctgaagtgaagaagccgggggcctcagtgatggtctcctgcaaggcttctggatacaccttcatcgactactatatttactgggtgcgacaggcccctggacaggggcttgagtggatgggatggatcaacccgaacagaggtggcacaaagtatgctcagaactttcagggaagggtcaccatgaccagggacacggccgtcagcacggcctatatggagctgaactccgtgagatctgacgacacggccgtctactactgtgcgagactacaaagccttcatgggctttactctaacgctgactactggggccagggaacgc

SEQ ID NO: 634 - DNA, 366 bp, Homo sapiens
caggtgcagctggtgcagtctggggctgaggtgaagaagcctggggcctcagtgatggtctcctgcaaggcttctggatacacattcatcgactactacatatactgggtgaggcaggcccctggacaagggcctgagtggatggggtggatcaacactaacaggggtggcacaaagtatgcacagaagtttcagggcagggtcaccctgaccagggacacggccgtcaccacggcctatctggagttgaacagcctgagatctgacgacacggccgtctattattgtgcgagactacaaagccttcatggactttattctaacgctgactactggggccagggaacgctggtcaccgtctcctca

SEQ ID NO: 635 - DNA, 388 bp, Homo sapiens
caggtgcagctggtgcagtctggggctgaggtaaagaagcctggggcctcggtgaaggtctcctgcaaggcttctggatacacgttcaccgactactttgtacactgggtgcgacaggcccctggacaaaattttgagtggatgggatggacccaacgtcaacactggtggcacaaattatgcaccaaagtttcagggcagggtcaccatgaccagggacacgtccatcagcacagcctacattgaactgagcggcctgacatctgacgacacggccgtttatattgtacgagagatgaattgttccgtgttgatgatgcctttgatatgtggggccaagggacactggtcaccgtctcttcagcctccaccaaggcccatcggtctt

SEQ ID NO: 636 - DNA, 376 bp, Homo sapiens
caggtgcagctggtgcagtctggggctgaggtgaagaagcctggggcctcagtaaaggtctcctgcaaggcttctggatacaccttcagcgcctactatctacactgggtgcgacaggcccctggacaagggcttgagtggatgggatgcatcaaccctaatagtggtgccacaatttacgcaccgaagtttcagggcagggtcaccttgaccacggacacgcccatcagcacgaccttcatggagatgagcggactgacatatggcgacacggccgtatattattgttcgagagattacgctgaaatcttgactgattattatatagtggactactggggccaggggaccctggtcaccatctcctcacgcctcc

SEQ ID NO: 637 - DNA, 376 bp, Homo sapiens
caggtgcagctggtgcagtctggggctgaggtgaagaagcctggggcctcagtgaaggtctcctgcaaggcttctggagacatcttcagcgactacggtgtacactgggtgcgacaggcccccggacaagggcttgagtggatgggatggatcaatcataatagtggtggcgcaacctatgcccagaagtttcacggcagggtcgccatgaccagggacacgtccatcagtatggccttcatggaactgagtagactgagatttgacgacacggccgtatattattgtgcgagagcccagaggcccgtggctgacgcacttgagcttgactcttggggccagggaacgctggtctccgtctcgtcacgcctccacc

SEQ ID NO: 638 - DNA, 491 bp, Homo sapiens
caggtgcagctggtgcagtctggggctgaggtaaagaagcctggggcctcggtgaaggtctcctgcaaggcttctggatacacgttcaccgactactttgtacactgggtgcgacaggtccctggacaaaattttgagtggatgggatggaccaacgtcaacactggtggcacaaactatgcaccaaagtttcagggcagggtcaccatgaccagggacacgtccatcagtacagcctacattgaactgagcggcctgacatctgacgacacggccgtttattattgtacgagagatgagttgttccgtgttgatgatgcctttgatatgtggggccaagggacactggtcaccgtctcttcagcctccaccaagggcccatcggccttccccctggcaccctcctccaagacgcacctctggggcacagcagccctgggctgcctggtcaaggactacttccccgaaccggtgacggtgtcgtggaactc

SEQ ID NO: 639 - DNA, 384 bp, Homo sapiens
caggtgcagctggtgcagtctggggctgaggtgaagaagcctggggcctcagtgatggtctcctgcaaggcttctggatacacattcatcgactactacatatactgggtgaggcaggcccctggacaagggcctgagtggatggggtggatcaacactaacaggggtggcacaaagtatgcacagaagtttcagggcagggtcaccctgaccagggacacggccgtcaccacggcctatctggagttgaacagcctgagatctgacgacacggccgtctattattgtgcgagactacaaagccttcatggactttactctaacgctgactactggggccagggacgctggtcaccgtctcctcagcctccaccaacgggccca

SEQ ID NO: 640 - DNA, 388 bp, Homo sapiens
caggtgcagctggtgcagtctggggctgaggtgaagaagcctggggcctcagtgaaggtctcctgccagacttctggatacacctccaccggccactatacacactgggtgcgacaggcccctggacaacgacctgagtggatgggatggatgaatcctaatagtggtggcacaacgtttgcaccgaaatttcagggcagaatcaccatgaccagggacacgtccaccagcacagcctacttggaggtgagaggtctgagggctgacgacacggccgtctattactgtgcgagagactattgtagtgggggtttctgccactacttctttgactcctggggccagggaaccctggtcaccgtctcctcagcctccaccaacgggccca

SEQ ID NO: 641 - DNA, 366 bp, Homo sapiens
caggtgcagctggtgcagtctgggcctgaagtgaagaagcctggggcctcagtgatggtctcctgcaaggcttctggatacaccttcatcgactactatatatactgggtgcgactggcccctggacaggggcttgagtggatgggatggatcaaccctaatagaggtggcacaaagtatgctcagaagtttcagggaaggatcaccatgaccagggacacggccgtcagcacggcctatatggagctgaccaccctgagatctgacgacacggccatgtactattgtgcgagactacaaagccttcatgggctttactctaacgctgactactggggccagggaacgctggtcaccgtctcctca

SEQ ID NO: 642 - DNA, 374 bp, Homo sapiens
caggtgcagctggtgcagtctggggctgaggtaaagaagcctggggcctcggtgaaggtctcctgcaaggcttctggatacacgttcaccgactactttgtacactgggtgcgacaggcccctggacaaaattttgagtggatgggatggaccaacgtcaacactggtggcacaaagtatgcaccaaagtttcagggcagggtcaccatgaccagggacacgtccatcagcacagcccacattgaactgagcggcctgacatctgacgacacggccgtttattattgtacgagagatgagttgttccgtgttgatgatgcctttgatatgtggggccaagggacactggtcaccgtctcttcagcctccaccaa

SEQ ID NO: 643 - DNA, 363 bp, Homo sapiens
caggtgcagctggtgcagtctggggctgacgtgaagaagcctggggcctcggtgaaggtctcctgcaaggcttctggatacacgttcaccgactactttgtacactgggtgcgacaggtccctggacaaaattttgagtggatgggatggaccaacgtcaacactggtggcacaaactatgcaccaaagtttcagggcagggtcaccatgaccagggacacgtccatcagtacagcctacattgaactgagcggcctgacatctgacgacacggccgtttattattgtacgagagatgagttgttccgtgttgatgatgcctttgatatgtggggccaagggacactggtcaccgtctcttca

SEQ ID NO: 644 - DNA, 423 bp, Homo sapiens
caggtgcagctggtgcagtctggggctgaggtgaagaagcctggggcctcagtgaaggtctcctgcaaggcttctggactcaccttcatcggctactatatgcactgggtgcgtcaggcccctggacaagggcttgagtggatgggatggatcaatcctaacaatggaaacacaaattatgcacagaagtttcgaggcagggtcaccatggccagggacacgtccatcagcacagcctacatggaactgaggggtctgaaatttgacgacacgtccatatattgctgtgcaatttcggcggacttttcgggcgtctccgactactactacatgggcgtctggggcaaagggaccacggtcaccgtctcctcaggagtgcatccgcccaaccctttcccctcgtcctcctctcgacgaattccc

SEQ ID NO: 645 - DNA, 464 bp, Homo sapiens
caggtgcagctggtgcagtctggggctgaggtgaagaagcctggggcctcagtgaaggtctcctgccagacttctggatacacctccaccggccactatacacactgggtgcgacaggcccctggacaacgacctgagtggatgggatggatgaatcctaatagtggtggcacaacgtttgcaccgaaatttcagggcagaatcaccatgaccagggacacgtccaccagcacagcctacttggagctgagaggtctgagggctgacgacacggccgtctattactgtgcgagagactattgtagtgggggtttctgccactacttctttgactcctggggccagggaaccctggtcaccgtctcctcagcctccaccaagggcccatcggtcttccccctggcaccctcctccaacgagcacctctggggcacagcggccctggctgcctggtcaggactact

SEQ ID NO: 646 - DNA, 335 bp, Homo sapiens
caggtgcagctggtgcagtctggggctgaggtgaagaagcctggggcctcaatgaaggtctcctgcaaggcttctggatacaccttcaacgactactatattcagtgggtgcgacaggcccctggacaaggtcttgagtggatgggatgtatcaatcctcagagtgatgacacaaagtatgcacagaaatttcaggggagggtcaccatgaccagggacacgtccaccaatacagcctacatggaactgagtggactgacatttgacgacacggccatgtattattgcctcactgcaatagatgggatcgtctactggggccagggacccctggt

SEQ ID NO: 647 - DNA, 374 bp, Homo sapiens
caggtgcagctggtgcagtctggggctgaggtaaagaagcctggggcctcggtgaaggtctcctgcaaggcttctggatacgcgttcaccgactactttgtacactgggtgcgacaggcccctggacaaaattttgagtggatgggatggaccaacgtcaacactggtggcacaaagtatgcaccaaagtttcagggcagggtcaccatgaccagggacacgtccatcagcacagcctacattgaactgagcggcctgacatctgacgacacggccgtttattattgtacgagagatgagttgttccgtgttgatgatgcctttgatatgtggggccaagggacactggtcaccgtctcttcagcctccaccaa

SEQ ID NO: 648 - DNA, 400 bp, Homo sapiens
caggtgcagctggtgcagtctggggctgaggtgaagaagcctggggcctcagtgaaggtctcctgccagacttctggatacacctccaccggccactatacacactgggtgcgacaggcccctggacaacgacctgagtggatgggatggatgaatcctaatagtggtggcacaacgtttgcaccgaaatttcagggcagaatcaccatgaccagggacacgtccaccagcacagcctacttggaggtgagaggtctgagggctgacgacacggccgtctattactgtgcgagagactattgtagtgggggtttctgccactacttctttgactcctggggccagggaaccctggtcaccatctcctcagcctccaccaaggcccatcggtcttccccct

SEQ ID NO: 649 - DNA, 377 bp, Homo sapiens
caggtgcagctggtgcagtctggggctgaggtgaagaagcctggggcctcagtgatggtctcctgcaaggcttctggatacacattcatcgactactacatatactgggtgaggcaggcccctggacaagggcctgagtggatggggtggatcaacactaacaggggtggcacaaagtatgcacagaagtttcagggcagggtcaccctgaccagggacacggccgtcaccacggcctatctggagttgaacagcctgagatctgacgacacggccgtctattattgtgcgagactacaaagccttcatggactttattctaacgctgactactggggccagggaacgctggtcaccgtctcctcagcctccaccaa

SEQ ID NO: 650 - DNA, 384 bp, Homo sapiens
caggtgcagctggtgcagtctggggctgaggtgaagaagcctggggcctcagtgaaggtctcctgcaaggcttctggatacaccttcaccacctactatatacactgggtgcgacaggcccctggacaagggcttgagtgggtgggatggttcaatcctaacagtggtggcgcacactatggactggactatcagggcagagtcactatgaccggggacacgtccatgaccacagtctacatggagttgaccaggctggcatccgacgacacggccatttattattgtgcgagagagggactttgtagaactaccagctgccaatttgactactggggccagggaacgctggtcaccgtcttctcagcctccaccaacgggccc

SEQ ID NO: 651 - DNA, 360 bp, Homo sapiens
caggtgcagctggtgcagtctggggttgaggtgaagaaacctggggcctcaatgaaggtctcctgcaaggcttctggatacaatttcaccggctactttatccactgggtgcgacagggccctggacaagggcttgagtggatgggatggatgaacccaaacaccggtggcgcaaagtatgcacagaagtttcagggcagggtcaccatgaccagggacacatccatcagaacagcctacatggaactgagcagcctaaaaacccggcgacacggccgtttatattgtgcgcgagacccccaagacggcactacttggtacacgcactggggccagggaacactggtcaccgtctcctca

SEQ ID NO: 652 - DNA, 373 bp, Homo sapiens
caggtgcagctggtgcagtctggggctgaggtgaagaagcctggggcctcagtgaaggtctcctgcaaggcttctggatacagtttcaccggctactatattcactggctgcgacagacccctggacaaggacctgagtggatgggatggatcaatcctaatactggtggcgcaaactatgcacccaattttgagggcagggtcaccatgaccagggacacgtccaccaagacagcctacatggaactgagcagactgagatctgacgacacggccttctactactgtgcggaggggggggttcttttaaggggttattattgttttcttttgatttcctggggtccagggaacgctggtgaccgtctcctca

SEQ ID NO: 653 - DNA, 377 bp, Homo sapiens
caggtgcagctggtgcagtctggggctgaggtgaagaagcctggggcctcagtgaaggtctcctgcaaggcttctggatacaggttcatcgactactatatacactgggtgcgacaggcccctggccaggggctcgactacatgggatggatcaaccctaagagtggtgacacaaactatgtaacgaagtttcagggcagggtcaccatgaccagggacacgtccatcagtacaggctacatggagatgaccgggctgatatctgacgacacggccgtctattactgtgcgaaaacaggtggaaagtacgctgactacctcgatattgactactggggccagggaaccctggtcaccgtctcctcaacctccaccaa

SEQ ID NO: 654 - DNA, 415 bp, Homo sapiens
caggtgcagctggtgcagtctggggctgaggtaaagaagcctggggcctcggtgaaggtctcctgcaaggcttctggatacacgttcaccgactactttgtacactgggtgcgacaggcccctggacaaaattttgagtggatgggatggaccaacgtcaacactggtggcacaaattatgcaccaaagtttcagggcagggtcaccatgaccagggacacgtccatcagcacagcctacattgaactgagcggcctgacatctgacgacacggccgtttattattgtacgagagatgaattgttccgtgttgatgatgcctttgatatgtggggccaagggacactggtcaccgtctcttcagcctccaccaaggcccatcggtcttccccctggccaccctcctccaacgacg

SEQ ID NO: 655 - DNA, 368 bp, Homo sapiens
caggtgcagctggtgcagtctggggttgaggtgaagaaacctggggcctcaatgaaggtctcctgcaaggcttctggatacaatttcaccggctactttatccactgggtgcgacagggccctggacaagggcttgagtggatgggatggatgaacccaaacaccggtggcgcaaagtatgcacagaagtttcagggcagggtcaccatgaccagggacacatccatcagaacagcctacatggaactgagcagcctaaaacccggcgacacggccgtttatcattgtgcgcgagacccccaagacggcactacttggtacacgcactggggccagggacactggtcaccgtctcctcagcctccacc

SEQ ID NO: 656 - DNA, 423 bp, Homo sapiens
caggtgcagctggtgcagtctggggcggaggtgaagaagcctggggcctcagtgaaggtctcctgccaggcttctggatacaccttcaccgactactatatacactgggtgcgacaggcccctggacaagggcttgagtggatgggatggatcaaccctaacagtggtggcacaaactatgcacagaagttccaaggcagactcacgattaccacggacgaatacacgaacacagcatatatggaattgagcagcctgagatctgaggacacggccgtgtattactgtgcgagagcccaagactctggttcggggaatttgatcaactggttcgacccctggggccagggaactctggtcaccgtctcctcagggagtgcatccgccccaacccttttcccctcgtctcctctgagaattccc

SEQ ID NO: 657 - DNA, 366 bp, Homo sapiens
caggtgcagctggtgcagtctggggctgaggtgaggaagcctggggcctcagtgaaggtctcctgcaaggcttctggatacagcttcagcgacttctatatacactgggtgcgacaggcccctggacaacgtcttgagtggatgggatggttcaaccctaacactggtggcgcacactctggactggactttcaggacagagtcaccatgaccggggacacgtccatcagcacagcctacatggaactgcccaggctggtatctgacgacacggccatttattactgtgcgagagagggacattgtcctaccaccagctgccattttgacttctggggccagggagcactggtcaccgtctcctca

SEQ ID NO: 658 - DNA, 371 bp, Homo sapiens
caggtgcagctggtgcagtctggggctgaggtaaagaagcctggggcctcggtgaaggtctcctgcaaggcttctggatacacgttcaccgactactttgtacactgggtgcgacaggcccctggacaaaattttgagtggatgggatggaccaacgtcaacactggtggcacaaattatgcaccaaagtttcagggcagggtcaccatgaccagggacacgtccatcagcacagcctacattgaactgagcggcctgacatctgacgacacggccgtttattattgtacgagagatgaattgttccgtgttgatgatgcctttgatatgtggggccaagggacacgtggtcaccgtctcttcacgcctcc

SEQ ID NO: 659 - DNA, 489 bp, Homo sapiens
caggtgcagctggtgcagtctggggctgaggtaaagaagcctggggcctcggtgaaggtctcctgcaaggcttctggatacacgttcaccgactactttgtacactgggtgcgacaggcccctggacaaaattttgagtggatgggatggaccaacgtcaacactggtggcacaaagtatgcaccaaagtttcagggcagggtcaccatgaccagggacacgtccatcagcacagcctacattgaactgagcggcctgacatctgacgacacggccgtttattattgtacgagagatgagttgttccgtgttgatgatgcctttgatatgtggggccaagggacactggtcaccgtctcttcagcctccaccaaggcccatcggtcttccccctggcaccctcctccaagagcacctctggggcacagcagccctgggctgcctggtcaaggactacttcccgaaccggtgacggtgtcgtggaactcg

SEQ ID NO: 660 - DNA, 363 bp, Homo sapiens
caggtgcagctggtgcagtctggggctgaggtaaagaagcctggggcctcggtgaaggtctcctgcaaggcttctggatacacgttcaccgactactttgtacactgggtgcgacaggcccctggacaaaattttgagtggatgggatggaccaacgtcaacactggtggcacaaagtatgcaccaaagtttcagggcagggtcaccatgaccagggacacgtccatcagcacagcctacattgaactgagcggcctgacatctgacgacacggccgtttattattgtacgagagatgagttgttccgtgttgatgatgcctttgatatgtggggccaagggacactggtcaccgtctcttca

SEQ ID NO: 661 - DNA, 362 bp, Homo sapiens
caggtgcagctggtgcagtctggggctgagatgaagaagcccggggcctcagtgaaggtctcctgcagggcttccggatacaggttcaacgactactatatgcactggttgcgacaggcccctggacaaggccctgagtggatgggttggatcaaccccaaacaatggtggcacaaaattatgcacagaggtttgagggcagggtcaccatgacctgggacaggtccatcaacacagcccacatggacctgaacaggctgatatctgacgacacggccgtttactactgtgcgagaggatttttccgcggttcggggagatatcccttccactttgacctcgtggggccagggaacgctggt

SEQ ID NO: 662 - DNA, 372 bp, Homo sapiens
caggtgcagctggtgcagtctggggctgaggtgaagaagcctggggcctcagtgaaggtctcctgcaaggcttctggactcaccttcatcggctactatatgcactgggtgcgtcaggcccctggacaagggcttgagtggatgggatggatcaatcctaacaatggaaacacaaattatgcacagaagtttcgaggcagggtcaccatggccagggacacgtccatcagcacagcctacatggaactgaggggtctgaaatttgacgacacgtccatatattactgtgcaatttcggcggacttttcgggcgtctccgactactactacatgggcgtctggggcaaagggactgcggtcaccgtctcctca

SEQ ID NO: 663 - DNA, 363 bp, Homo sapiens
caggtgcagctggtgcagtctggggctgaggtaaagaagcctggggcctcggtgaaggtctcctgcaaggcttctggatacacgttcaccgactactttgtacactgggtgcgacaggcccctggacaaaattttgagtggatgggatggaccaacgtcaacactggtggcacaaattatgcaccaaagtttcagggcagggtcaccatgaccagggacacgtccatcagcacagcctacattgaactgagcggcctgacatctgacgacacggccgtttattattgtacgagagatgaattgttccgtgttgatgatgcctttgatatgtggggccaagggacactggtcaccgtctcttca

SEQ ID NO: 664 - DNA, 411 bp, Homo sapiens
caggtgcagctggtgcagtctggggctgaggtaaagaagcctggggcctcggtgagggtctcctgcaaggcttctggatacacgttcaccgactactttgtacactgggtgcgacaggcccctggacaaaattttgagtggatgggatggaccaacgtcaacactggtggcacaaagtatgcaccaaagtttcagggcagggtcaccatgaccagggacacgtccaacagcacagcctacattgaactgagcggcctgacatctgacgacacggccgtttattactgtgcgagagacccccaagaaggcagcagctggtacacgcactggggccagggaacgctggtcaccgtctcctcagcctccaccaacgggcccatcggtcttcccccgtggccaccctcctccaac

SEQ ID NO: 665 - DNA, 398 bp, Homo sapiens
caggtgcagctggtgcactctggggctgaggtgaagaagcctggggcctccgtgaaggtctcctgtcagacttctggatacacgttcagcgactactttctccactgggtgcgacaggcccctggacaagggcttgagtggatggcatggatcaaccctactaatggtgacacaaactttgcacagacgtttcagggcagggtcaccgtgaccagggacacgtccattagcacagtctacatggagctcagcagtctgaagtctgacgacacggccgtgtatttctgtgcgagaggagtccggcgctatagtggcagctggtacttggggtactggggccagggaaccctggtcaccgtctcctcagcctccaccaagggcccatccggtcttccccc

SEQ ID NO: 666 - DNA, 367 bp, Homo sapiens
caggtgcagctggtgcagtctggggctgaggtgaagaagcctggggcctcagtgaaagtctcctgcaaggcttctggatacagtttcagcgactaccatctacactgggtgcgacaggcccctggacaagggcttgagtggatgggatggatcaaccataatggcggtggcgcaacctatgcacagaagttccagggcagagtcgccatgaccagggacacgtccatcagcacagtctttatggaattgagcaggctgcgatttgacgacacggccgtgtattactgtgcgagctcagtgggagccgatttctgctttgactactggggccagggaacgctggtcaccggtctcctcagggagtgca

SEQ ID NO: 667 - DNA, 447 bp, Homo sapiens
caggtgcagctggtgcagtctggggctgaggtaaagaagcctggggcctcggtgaaggtctcctgcaaggcttctggatacacgttcaccgactactttgtacactgggtgcgacaggcccctggacaaaattttgagtggatgggatggaccaacgtcaacactggtggcacaaagtatgcaccaaagtttcagggcagggtcaccatgaccagggacacgtccatcagcacagcctacattgaactgagcggcctgacatctgacgacacggccgtttattattgtacgagagatgagttgttccgtgttgatgatgcctttgatatgtggggccaagggacactggtcaccgtctcttcagcctccaccaacggcccatccggtcttccccctggccgccctgcctccacggacgccacctccgacgagccacgacgccggccc

SEQ ID NO: 668 - DNA, 363 bp, Homo sapiens; identical to SEQ ID NO: 660

SEQ ID NO: 669 - DNA, 353 bp, Homo sapiens
caggtgcagctggtgcactctggggctgaggtgaagaagcctggggcctccgtgaaggtctcctgtcagacttctggatacacgttcagcgactactttctccactgggtgcgacaggcccctggacaagggcttgagtggatggcatggatcaaccctactaatggtgacacaaactttgcacagacgtttcagggcagggtcaccgtgaccagggacacgtccattagcacagtctacatggagctcagcagtctgaagtctgacgacacggccgtgtatttctgtgcgagaggagtccggcgctatagtggcagctggtacttggggtactggggccagggaaccctggt

SEQ ID NO: 670 - DNA, 375 bp, Homo sapiens
caggtgcagctggtgcactctggggctgaggtgaagaagcctggggcctccgtgaaggtctcctgtcagacttctggatacacgttcagcgactactttctccactgggtgcgacaggcccctggacaagggcttgagtggatggcatggatcaaccctactaatggtgacacaaactttgcacagacgtttcagggcagggtcaccgtgaccagggacacgtccattagcacagtctacatggagctcagcagtctgaagtctgacgacacggccgtgtatttctgtgcgagaggagtccggcgctatagtggcagctggtacttggggtactggggccagggaaccctggtcaccgtctcctcagcctccacc

SEQ ID NO: 671 - DNA, 350 bp, Homo sapiens
caggtgcagctggtgcaatctggggctgaagtgaagaagcctggggcctcagtgatggtctcctgcaaggcttctggatacaccttcatcgactactatatatactgggtgcgacaggcccccggagaagggcttgagtggatgggatggatcaaccctaacagaggtggcaacaaagtatgcacagaagtttcgggaccgggtcaccatgaccagggacacggccgtcagcacggcctatatggaactgaacagcctgagatctgacgacacggccgtctactactgtgcgagacttcagagccttagtgggtctttactctaacgctgactacgtggggccagggaac

SEQ ID NO: 672 - DNA, 414 bp, Homo sapiens
caggtgcagctggtgcagtctggggctgaggtaaagaagcctggggcctcggtgaaggtctcctgcaaggcttctggatacacgttcaccgactactttgtacactgggtgcgacaggcccctggacaaaattttgagtggatgggatggacccaacgtcaacactggtggcacaaattatgcaccaaagtttcagggcagggtcaccatgaccagggacacgtccatcagcacagcctacattgaactgagcggcctgacatctgacgacacggccgtttatactgtgcgagaggagattatgattacctttggggaaattatcgttttgaatactggggccagggaaccctggtcaccgtctcctcagcctccaccaagggcccatcggtcttccccctggcaccctcctcc

SEQ ID NO: 673 - DNA, 365 bp, Homo sapiens
caggtgcagctggtgcagtctggggctgaggtgaagaagcctggggcctcagtgaaggtctcctgcaaggcttctggatacaggttcatcgactactatatacactgggtgcgacaggcccctggccaggggctcgactacatggggtggatcaaccctaagagtggtgacacaaactatgtaacgaagtttcagggcagggtcaccatgaccagggacacgtccatcagtacaggctacatggagatgaccgggctgatatctgacgacacggccgtctattactgtgcgaaaacaggtggaaagtacgctgactacctcgatattgactactggggccagggaaccctggtcaccgtctcctc

SEQ ID NO: 674 - DNA, 377 bp, Homo sapiens
caggtgcagctggtgcagtctggggctgaggtgaagaagcctggggcctcagtgaaggtctcctgcaaggcttctggatacaggttcatcgactactatatacactgggtgcgacaggcccctggccaggggctcgactacatggggtggatcaaccctaagagtggtgacacaaactatgtaacgaagtttcagggcagggtcaccatgaccagggacacgtccatcagtacaggctacatggagatgaccgggctgatatctgacgacacggccgtctattactgtgcgaaaacaggtggaaagtacgctgactacctcgatattgactactggggccagggaaccctggtcaccgtctcctcaacctccaccaa

SEQ ID NO: 675 - DNA, 374 bp, Homo sapiens
caggtgcagctggtgcagtctggggctgaggtaaagaagcctggggcctcggtgaaggtctcctgcaaggcttctggatacacgttcaccgactactttgtacactgggtgcgacaggcccctggacaaaattttgagtggatgggatggaccaacgtcaacactggtggcacaaactatgcaccaaagtttcagggcagagtcaccatgaccagggacacgtccatcagcacagcctacattgaactgagcggcctgacatctgacgacacggccgtttattattgtacgagagatgagttgttccgtgttgatgatgcctttgatatgtggggccaagggacactggtcaccgtctcttcagcctccaccaa

SEQ ID NO: 676 - DNA, 365 bp, Homo sapiens; identical to SEQ ID NO: 673

SEQ ID NO: 677 - DNA, 374 bp, Homo sapiens
caggtgcagctggtgcagtctggggctgaggtaaagaagcctggggcctcggtgaaggtctcctgcaaggcttctggatacacgttcaccgactactttgtacactgggtgcgacaggcccctggacaaaattttgagtggatgggatggaccaacgtcaacactggtggcacaaagtatgcaccaaagtttcagggcagggtcaccatgaccagggacacgtccatcagcacagcctacattgaactgagcggcctgacatctgacgacacggccgtttattattgtacgagagatgagttgttccgtgttgatgatgcctttgatatgtggggccaagggacactggtcaccgtctcttcagcctccaccaa

SEQ ID NO: 678 - DNA, 378 bp, Homo sapiens
  misc_feature (297)..(297): n is a, c, g, or t
caggtgcagctggtgcagtctggggctgaggtgaagaagcctggggcctcagtgaaggtctcctgcaaggcttctggatacaggttcatcgactactatatacactgggtgcgacaggcccctggccaggggctcgactacatggggtggatcaaccctaagagtggtgacacaaactatgtaacgaagtttcagggcagggtcaccatgaccagggacacgtccatcagtacaggctacatggagatgaccgggctgatatctgacgacacggccgtctattactgtgcgaaaacnggtggaaagtacgctgactacctcgatattgactactggggccagggaaccctggtcaccgtctcctcaacctccaccaac

SEQ ID NO: 679 - DNA, 364 bp, Homo sapiens
caggtgcagctggtgcagtctggggctgaggtaaagaagcctggggcctcggtgaaggtctcctgcaaggcttctggatacacgttcaccgactactttgtacactgggtgcgacaggcccctggacaaaattttgagtggatgggatggaccaacgtcaacactggtggcacaaagtatgcaccaaagtttcagggcagggtcaccatgaccagggacacgtccatcagcacagcctacattgaactgagcggcctgacatctgacgacacggccgtttattattgtacgagagatgagttgttccgtgttgatgatgcctttgatatgtggggccaagggacacgtggtcaccgtctcttca

SEQ ID NO: 680 - DNA, 363 bp, Homo sapiens; identical to SEQ ID NO: 660

SEQ ID NO: 681 - DNA, 384 bp, Homo sapiens
caggtgcagctggtgcaatctggggctgaagtgaggaagcctggggcctcagtgaaagtctcctgcaaggcttctggatatatcttcaccggccactatatgaactgggtgcgagaggcccctggacaaggtcttgagtggatgggatggatcaaccctgacagtggaggcacaaaatatgcagaacagtttcagggcagggtcaccacgaccagggacacgtccatcaacacagtctacatggagctgagcagcctcagatctgacgacacggccatatattattgtgcgcgattgtttgtagtagttccagtctactttttccggtgaaataactgtcttttgatatcgtggggccaagggacaacggtcaccgtctcttca

SEQ ID NO: 682 - DNA, 414 bp, Homo sapiens
caggtgcagctggtgcagtctggggctgaggtaaagaagcctggggcctcggtgaaggtctcctgcaaggcttctggatacacgttcaccgactactttgtacactgggtgcgacaggcccctggacaaaattttgagtggatgggatggaccaacgtcaacactggtggcacaaagtatgcaccaaagtttcagggcagggtcaccatgaccagggacacgtccatcagcacagcctacattgaactgagcggcctgacatctgacgacacggccgtttattattgtacgagagatgagttgttccgtgttgatgatgcctttgatatgtggggccaagggacactggtcaccgtctcctcagggagtgcatccgccccaacccttttcccctcgtctcctctgagaattccc

SEQ ID NO: 683 - DNA, 420 bp, Homo sapiens
caggtgcagctggtgcagtctggggctgaggtaaagaagcctggggcctcggtgaaggtctcctgcaaggcttctggatacacgttcaccgactactttgtacactgggtgcgacaggcccctggacaaaattttgagtggatgggatggaccaacgtcaacactggtggcacaaagtatgcaccaaagtttcagggcagggtcaccatgaccagggacacgtccatcagcacagcctacattgaactgagcggcctgacatctgacgacacggccgtttattattgtacgagagatgaattgttccgtgttgatgatgcctttgatatgtggggccaagggacactggtcaccgtctcttcagcctccaccaacgggcccatcggtccttcccccgtcggccaccctcctccaacgacg

SEQ ID NO: 684 - DNA, 365 bp, Homo sapiens
caggtgcagctgctacagtctggggctgaggtgaagaagcctggggcctcagtgatggtctcctgcaaggcttctggatacaccttcatcgactactacatatactgggtgcggcaggcccctggacaagggcttgagtggatgggatggatcaaccctaacagaggtggcaccaagtatgcacagaagtttcagggcagggtcaccttgaccagggacacggccgtcaccacggcctatctggaggtgaacagcctgagatctgacgacacggccgtctattattgtgcgagactacaaagccttcatggattttactctaacgctgactactggggccagggacgctggtcaccgtctcctca

SEQ ID NO: 685 - DNA, 414 bp, Homo sapiens
caggtgcagctggtgcagtctggggctgaggtgaagaagcctggggcctcagtgaaggtctcctgcaaggcctctggatacagtttcagcgactaccatatacactgggtgcgacaggcccctggacaagggcttgagtggatgggatggatcaaccagaatggtggtggcgcaacacatgtacagaagttccagggcagggtcgccatgaccagggacacgtccatcagcacagcctttatggagctgagcaggctgagatttgacgacacggccatatattattgtgcgcgagccctgaggccagtggctgacgcgcttgagcttgactattggggccgagggaacgctggtcaccgtctcgtcacgcctccaccaacgggcccagtccggtccttcccccgtcggccaccc

SEQ ID NO: 686 - DNA, 415 bp, Homo sapiens
caggtgcagctggtgcagtctggagctgaggtgaagaagcctggggcctcagtgaaggtctcctgcaaggcttctggttacacctttaccagctatggtatcagctgggtgcgacaggcccctggacaaggccttgagtggatgggatggatcaatcctaacaatgatggcacaacctatgcacacaaatttcagggcagggtcaccgtgaccagggacacgtccattagtacggcctacatggagctgagcggactgagatctgacgacacggccatttattactgtgcgagagcgccatacagcgcactatacttctacatggacgtctggggcaaagggaccacggtcaccgtctcctcagggagtgcatccgccccaacccttttcccctcgtctcctctgagaattcccc

SEQ ID NO: 687 - DNA, 368 bp, Homo sapiens
caggtgcagctggtgcagtctggggctgaggtgaagaagcctggggcctcagtaaaggtctcctgcaaggcttctggatacaccttcagcgcctactatctacactgggtgcgacaggcccctggacaagggcttgagtggatgggatgcatcaaccctaatagtggtgccacaatttacgcaccgaagtttcagggcagggtcaccttgaccacggacacgtccatcagcacgaccttcatggagatgagcggactgacatatggcgacacggccgtatattattgttcgagagatcacgctgaaatcttgactgattattatatagtggactactggggccaggggaccctggtcaccgtctcctc

SEQ ID NO: 688 - DNA, 400 bp, Homo sapiens
caggtgcagctggtgcagtctggggttgaggtgaagaaacctggggcctcaatgaaggtctcctgcaaggcttctggatacaatttcaccggctactttatccactgggtgcgacagggccctggacaagggcttgagtggatgggatggatgaacccaaacaccggtggcgcaaagtatgcacagaagtttcagggcagggtcaccatgaccagggacacatccatcagaacagcctacatggaactgagcagcctaaaacccggcgacacggccgtttattattgtgcgcgagacccccaagacggcactacttggtacacgcactggggccagggaacactggtcaccgtctcctcagcctccaccaagggcccatccggtccttcccccgtggccg

SEQ ID NO: 689 - DNA, 382 bp, Homo sapiens
caggtgcagctggtgcagtctggggctgaggtgaagaagcctggggcctcagtgaaggtctcctgcaaggcctctggatacagtttcagcgactaccatatacactgggtgcgacaggcccctggacaagggcttgagtggatgggatggatcaaccagaatggtggtggcgcaacacatgtacagaagttccagggcagggtcgccatgaccagggacacgtccatcagcacagcctttatggagctgagcaggctgagatttgacgacacggccatatattattgtgcgcgagccctgaggccagtggctgacgcgcttgagcttgactattggggccagggaacgctggtcaccgtctcctcagggagtgcatccgccc

SEQ ID NO: 690 - DNA, 366 bp, Homo sapiens
caggtgcagctggtgcagtctggggctgaggtgaagaagcctggggcctcagtgaaggtctcctgcaaggcctctggatacagtttcagcgactaccatatacactgggtgcgacaggcccctggacaagggcttgagtggatgggatggatcaaccagaatggtggtggcgcaacacatgtacagaagttccagggcagggtcgccatgaccagggacacgtccatcagcacagcctttatggagctgagcaggctgagatttgacgacacggccatatattattgtgcgcgagccctgaggccagtggctgacgcgcttgagcttgactattggggccagggaacgctggtcaccgtctcgtca

SEQ ID NO: 691 - DNA, 366 bp, Homo sapiens
  misc_feature (319)..(319): n is a, c, g, or t
caggtgcagctgctacagtctggggctgaggtgaagaagcctggggcctcagtgatggtctcctgcaaggcttctggatacaccttcatcgactactacatatactgggtgcggcaggcccctggacaagggcttgagtggatgggatggatcaaccctaacagaggtggcaccaagtatgcacagaagtttcagggcagggtcaccttgaccagggacacggccgtcaccacggcctatctggaggtgaacagcctgagatctgacgacacggccgtctattattgtgcgagactacaaagccttcatggattttacnctaacgctgactactggggccagggaacgctggtcaccgtctcctca

SEQ ID NO: 692 - DNA, 383 bp, Homo sapiens
caggtgcagctggtgcagtctggggttgaggtgaagaaacctggggcctcaatgaaggtctcctgcaaggcttctggatacaatttcaccggctactttatccactgggtgcgacagggccctggacaagggcttgagtggatgggatggatgaacccaaacaccggtggcgcaaagtatgcacagaagtttcagggcagggtcaccatgaccagggacacatccatcagaacagcctacatggaactgagcagcctaaaacccggcgacacggccgtttattattgtgcgcgagacccccaagacggcactacttggtacacgcactggggccagggaacactggtcaccgtctcctcagcctccaccaaggcccatcggtc

SEQ ID NO: 693 - DNA, 415 bp, Homo sapiens
caggtgcagctggtgcagtctggggctgaggtgaagaagcctggggcctcagtgaaggtctcctgcaaaatttctggatacaccttcaccaagttctacatacactgggtgcgacaggcccctgggcaagggcttgagtggttgggatggatcaaccctaacaatggtggcacaaagtctgcacagcagtttcagggcagggtcgccttgaccagggacacgtccctcagcacagcctatattgaactgagcagcctgacatctgacgacacggccgtttattactgtgcgagaggagattatgattacctttggggaaattatcgttttgaatactggggccagggaaccctggtcaccgtctcctcagcctccaccaaggcccatcggtcttccccctggccgccctcgctcc

SEQ ID NO: 694 - DNA, 423 bp, Homo sapiens
caggtgcagctggtgcagtctggggctgaagtgaagaagcctggggcctcagtgaaggtctcctgcaagacctctggatacaccttcaccgacaattatatacactgggtgcgccaggcccctggacaagggcttgagtggatgggatggatcaaccctaatagtggtggctcaaagtctccacagaagtttcagggcagggtcaccatgaccagggacacgtccgtcagtacagtctacttggaattgaccaggctgaaatttgacgacacggccatttattactgtacgaaagattatggcatagtgggatctactctacccgaatacttccaacactggggccagggcaccctggtcaccgtctcctcacgcctccaccaacggcccatccggtcttccccctcggccaccctcctccaa

SEQ ID NO: 695 - DNA, 427 bp, Homo sapiens
caggtgcagctggtgcagtctggggttgaggtgaagaaacctggggcctcaatgaaggtctcctgcaaggcttctggatacaatttcaccggctactttatccactgggtgcgacagggccctggacaagggcttgagtggatgggatggatgaacccaaacaccggtggcgcaaagtatgcacagaagtttcagggcagggtcaccatgaccagggacacatccatcagaacagcctacatggaactgagcagcctaaaacccggcgacacggccgtttattattgtgcgcgagacccccaagacggcactacttggtacacgcactggggccagggaacactggtcaccgtctcctcagcctccaccaagggcccatccggtccttcccccgtggccgccctgcctcccaggacgccacctccga

SEQ ID NO: 696 - DNA, 366 bp, Homo sapiens; identical to SEQ ID NO: 690

SEQ ID NO: 697 - DNA, 403 bp, Homo sapiens
caggtgcagctggtgcagtctggggttgaggtgaagaaacctggggcctcaatgaaggtctcctgcaaggcttctggatacaatttcaccggctactttatccactgggtgcgacagggccctggacaagggcttgagtggatgggatggatgaacccaaacaccggtggcgcaaagtatgcacagaagtttcagggcagggtcaccatgaccagggacacatccatcagaacagcctacatggaactgagcagcctaaaacccggcgacacggccgtttattattgtgcgcgagacccccaagacggcactacttggtacacgcactggggccagggaacactggtcaccgtctcctcagcctccaccaagggcccatccggtcttccccctggccgccctg

SEQ ID NO: 698 - DNA, 369 bp, Homo sapiens
caggtgcagctggtgcagtctggggctgaggtgaagaagcctggggcctcagtgaaggtctcctgcaaggcctctggatacagtttcagcgactaccatatacactgggtgcgacaggcccctggacaagggcttgagtggatgggatggatcaaccagaatggtggtggcgcaacacatgtacagaagttccagggcagggtcgccatgaccagggacacgtccatcagcacagcctttatggagctgagcaggctgagatttgacgacacggccatatattattgtgcgcgagccctgaggccagtggctgacgcgcttgagcttgactattggggccagggaacgctggtcaccgtctcgtcagcc

SEQ ID NO: 699 - DNA, 391 bp, Homo sapiens
caggtgcagctggtgcagtctggggctgaagtgaagaagcctggggcctcagtgaaggtctcctgcaaggcttctggatacatcttcaacaactactttttgcactgggtgcgacaggcccctggacaggggcttgagtggatggggtggatcaaccctaacactgctggcacaaactatgcatacaactttcggggcagggtcagcatgaccagggacacgtccaccggaacagcctacatggagctgagcaggctgagatctgacgacacggccgtgtatttctgtgcttcatgcgagcggggtgtagttggtgttacgacgttagggacggggggctacgtacgccagtggacgtcgtggggccaagggacccacggtcgccgtctcc

SEQ ID NO: 700 - DNA, 367 bp, Homo sapiens
caggtgcagctggtgcagtctggggctgaggtgaagaagcctggggcctcagtgaaggtctcctgcaaggcctctggatacagtttcagcgactaccatatacactgggtgcgacaggcccctggacaagggcttgagtggatgggatggatcaaccagaatggtggtggcgcaacacatgtacagaagttccagggcagggtcgccatgaccagggacacgtccatcagcacagcctttatggagctgagcaggctgagatttgacgacacggccatatattattgtgcgcgagccctgaggccagtggctgacgcgcttgagcttgactattggggccgagggaacgctggtcaccgtctcgtca

SEQ ID NO: 701 - DNA, 366 bp, Homo sapiens; identical to SEQ ID NO: 691
  misc_feature (319)..(319): n is a, c, g, or t

SEQ ID NO: 702 - DNA, 410 bp, Homo sapiens
caggtgcagctggtgcagtctggggctgaggtgaagaagcctggggcctcagtgaaggtctcctgcaaggcttctggatacaccttcaccggctactatatgcactgggtgcgacaggcccctggacaagggcttgagtggatgggatggatcaaccctaacagtggtggcacaaactatgcacagaagtttcagggcagagtcacgattagcacggacgaatccacggccaccgtttatatggaattgagcagcctcagatttgaagacacggccatatattactgtgcgagagataggttctatggttcgggaagttatgtctactggggccagggaacgctggtcaccgtctcctcagggagtgcatccgccccaaccctttcccctcgtctcctctgagaattccc

SEQ ID NO: 703 - DNA, 362 bp, Homo sapiens
caggtgcagctggtgcagtctggggttgaggtgaagaaacctggggcctcaatgaaggtctcctgcaaggcttctggatacaatttcaccggctactttatccactgggtgcgacagggccctggacaagggcttgagtggatgggatggatgaacccaaacaccggtggcgcaaagtatgcacagaagtttcagggcagggtcaccatgaccagggacacatccatcagaacagcctacatggaactgagcagcctaaaacccggcgacacggccgtttattattgtgcgcgagacccccaagacggcactacttggtacacgcactggggccagggaacaccggtcaccgtctcctcacg

SEQ ID NO: 704 - DNA, 371 bp, Homo sapiens
caggtgcagctggtgcagtctggggctgaggcgaagaagcctggggtctcagtgaaggtctcctgcaagacttctggatacattttcaccggcttctatattcactgggtgcgacaggcccctggacaggggcttgagtggatgggatggatcaaccctaaaactggtggcgcaaactatgcacagaagtttcagggaagagtcaccatgaccagggacatgcccatcaggacaatcttcatggagttgagtagtctgggatccgacgacacggccgtgtattattgcgcgagagagtaggggggttgaaggttactagtggttcgggagttgcaatactggggccagggaacgctggtcaccgtctcctc

SEQ ID NO: 705 - DNA, 375 bp, Homo sapiens
caggtgcagctggtgcagtctggggctgaagtgaagaagcctggggcctcagtgaaggtctcctgcaagacctctggatacaccttcaccgacaattatatacactgggtgcgccaggcccctggacaagggcttgagtggatgggatggatcaaccctaatagtggtggctcaaagtctccacagaagtttcagggcagggtcaccatgaccagggacacgtccgtcagtacagtctacttggaattgaccaggctgaaatttgacgacacggccatttattactgtacgaaagattatggcatagtgggatctactctacccgaatacttccaacactggggccagggcaccctggtcaccgtctcctcagcc

SEQ ID NO: 706 - DNA, 375 bp, Homo sapiens
caggtgcagctggtgcagtctggggctgaggtgaagaagcctggggcctcagtgaaggtctcctgcaaggcttctggatacaccttcaccggctactatatgcactgggtgcgacaggcccctggacaagggcttgagtggatgggatggatcaaccctaacagtggtggcacaaactatgcacagaagttccagggcagactcacgattaccgcggacgagtccacgaacacgggttacatggaacttgacaacctgcgatctgacgacacggccatatattactgtgcgcgaggacggactgtccacccatttgaatactactattactatatggacgtctggggcaaagggaccacggtcaccgtcacttca

SEQ ID NO: 707 - DNA, 366 bp, Homo sapiens
caggtgcagctggtgcagtctggggcggaggtgaagaagcctggggcctcagtgaaggtctcctgccaggcttctggatacaccttcaccgactactatatacactggctgcgacaggcccctggacaagggcttgagtggatgggatggatcaaccctaacagtggtggcgcacactatggactggactatcagggcagagtcacgatgaccggggacacgtccatcaccacagtctacatggagttgaccagactggcatccgacgacacggccatttattattgtgcgagagagggactttgtggaactaccagctgccaatttgacttctggggccagggaacgctggtcaccgtcttctca

SEQ ID NO: 708 - DNA, 370 bp, Homo sapiens
caggtgcagctggtgcagtctggggctgaggtgaagaagcctggggcctcagtgaaggtctcctgcaaggcctctggatacagtttcagcgactaccatatacactgggtgcgacaggcccctggacaagggcttgagtggatgggatggatcaaccagaatggtggtggcgcaacacatgtacagaagttccagggcagggtcgccatgaccagggacacgtccatcagcacagcctttatggagctgagcaggctgagatttgacgacacggccatatattattgtgcgcgagccctgaggccagtggctgacgcgcttgagcttgactattggggccagggaacgctggtcaccgtctcctcaggga

SEQ ID NO: 709 - DNA, 373 bp, Homo sapiens
caggtgcagctggtgcagtctggggctgaggtaaagaagcctggggcctcggtgaaggtctcctgcaaggcttctggatacaccttcaccgactactttgtacactgggtgcgacaggcccctggacaaaattttgagtggatgggatggaccaacgtcaacactggtggcacaaagtatgcaccaaagtttcagggcagggtcaccatgaccagggacacgtccatcagcacagcctacattgaactgagcggcctgacatctgacgacacggccgtttattattgtacgagagatgagttgttccgtgttgatgatgcctttgatatgtggggccaagggacacgtggtcaccgtctcttcagcctccacc

SEQ ID NO: 710 - DNA, 486 bp, Homo sapiens
caggtgcagctggtgcagtctggggttgaggtgaagaaacctggggcctcaatgaaggtctcctgcaaggcttctggatacaatttcaccggctactttatccactgggtgcgacagggccctggacaagggcttgagtggatgggatggatgaacccaaacaccggtggcgcaaagtatgcacagaagtttcagggcagggtcaccatgaccagggacacatccatcagaacagcctacatggaactgagcagcctaaaacccggcgacacggccgtttattattgtgcgcgagacccccaagacggcactacttggtacacgcactggggccagggaacactggtcaccgtctcctcagcctcaccaagggcccatccggtcttccccctggccgccctgcctccaggacgcacctccgagacgcacagccggccctgggctgcctggtcaaggactaccttcccgaaccggtgacggtgtcgt

SEQ ID NO: 711 - DNA, 378 bp, Homo sapiens
caggtgcagctggtgcagtctgggtctgaggtgaagaagcctggggcctcagtgaaggtctcctgcaaggcttccggatacaccttcaccacctactatatacactgggtgcgacaggcccctggacaagggcttgagtgggtgggatggttcaatcctaacagtggtggcgcacactttggactggactttcagggcagagtcaccatgaccggggacacgtccatcagcacagtctacatggacctgaccagcctggcatctgtcgacacggccatttattactgtgcgagagagggacgctgtcctactaccagctgccattttgactactggggccagggaacgctggtcaccgtctcctcacgcctccaccaa

SEQ ID NO: 712 - DNA, 431 bp, Homo sapiens
caggtgcagctggtgcagtctggggttgaggtgaagaaacctggggcctcaatgaaggtctcctgcaaggcttctggatacaatttcaccggctactttatccactgggtgcgacagggccctggacaagggcttgagtggatgggatggatgaacccaaacaccggtggcgcaaagtatgcacagaagtttcagggcagggtcaccatgaccagggacacatccatcagaacagcctacatggaactgagcagcctaaaacccggcgacacggccgtttattattgtgcgcgagacccccaagacggcactacttggtacacgcactggggccagggaacactggtcaccgtctcctcacgcctccaccaagggcccatcggtccttcccccgtggccgccctgcctccgaggacgccacctccgagacg

SEQ ID NO: 713 - DNA, 369 bp, Homo sapiens
caggtgcagctggtgcagtctggggctgaggtgaagaagcctgggtcctcggtgaaggtctcctgcaaggcttctggatacaccttcagcgcctactatctacactgggtgcgacaggcccctggacaagggcttgagtggatgggatgcatcaaccctaatagtggtgccacaatttacgcaccgaagtttcagggcagggtcaccttgaccacggacacgtccatcagcacgaccttcatggagatgagcggactgacatatggcgacacggccgtctattactgtgcgagaaataccgactcagtggctacctctttgtacagtttgggcgtctggggccaagggaccacggtcaccgtctcctca

SEQ ID NO: 714 - DNA, 372 bp, Homo sapiens
caggtgcagctggtgcagtctggggctgaagtgaagaagcctggggcctcagtgaaggtctcctgcaagacttctggatacagcttcaccggcaactatatacactgggtgcgccaggcccctggacaagggcttgagtggatgggatggatcaaccctaatagtggtggctcaaagtctccacagaagtttcagggcagggtcaccatgaccagggacacgtccgtcagtacagtttacttggaattgaccaggctgaaatttgacgacacggccatatattactgtacgaaagattatggcatagtgggatctactctacccgaatacttccaacactggggccagggcaccctggtcaccgtctcctca

SEQ ID NO: 715 - DNA, 413 bp, Homo sapiens
caggtgcagctggtgcaatctggggctgaggtgaagaagcctggggcctcagtgaaggtctcctgcaaggcttctagatacacggtcaccggctattttatccactgggtgcgacaggcccctggacaagggctggagtggatgggttggatcaagcctaacagtgagagcacaaactatgcacagaagttccagggcagagtcacgattaccgcggacgaatccacgagcacagcctacatggagctgagcagcctgagatctgaggacacggccgtgtattactgtgcgagttcgagagcagccggaggctactactactactacatggacgtctggggcaaagggaccacggtcaccgtctcctcagggagtgcatccgccccaacccttttccccctcgtctcctctga

SEQ ID NO: 716 - DNA, 421 bp, Homo sapiens
caggtgcagctggtgcagtctggggctgcggtgaagaagccggggtcgtcggtgaaggtctcctgcaaggcttctggaggcgtcttcactaagtatgacatcaactgggtgcgacagggcccctggacaagggcttgagtggatgggatggatcaaccctaacagtggtggcacaaactatgcacagaaatttcaggggcagggtcaccatgaccagggacacgtccatcaccacagcctacatggagctgagcaggctgacatctgacgacacggccgtatattactgtgcgcgcctgtatagtacctcgtcctctcccttgtcggggctttgactggggccagggaaccctggtcaccgtctcctcagggagtgcatccgccccaacccttttccccctcgtctcctctgagaattccc

SEQ ID NO: 717 - DNA, 354 bp, Homo sapiens
caggtgcagctggtgcagtctggggctgaggtgaagaatcttggggcctccgtgaaggtctcctgcaaggtttccggacacaccctcactgacttatccttacactgggtgcgacaggcccctggaaaagggcttgagtggatgggaggttttgatccggaagatgaagaaacaatctacgcacaggagttccagggcagaatcatcatgaccgaggacacatctacagacacagcctacatggaactgagcagcctgagatctcacgacacggccgtatattattgtgcagtttcagcctatgacacttctctagactactggggccagggcacgctggtcaccgtctcctca

SEQ ID NO: 718 - DNA, 372 bp, Homo sapiens
caggtgcagctggtgcagtctggggctgaagtgaagaagcctggggcctcagtgaaggtctcctgcaagacttctggatacagcttcaccggcaactatatacactgggtgcgccaggcccctggacaagggcttgagtggatgggatggatcaaccctaatagtggtggctcaaagtctccacagaagtttcagggcagggtcaccatgaccagggacacgtccgtcagtacagtttacttggaattgaccaggctgaaatttgacgacacggccatatattactgtacgaaagattatggcatgttgggatctactctacccgaatacttccaacactggggccagggcaccgtggtcaccgtctcctca

SEQ ID NO: 719 - DNA, 343 bp, Homo sapiens
caggtgcagctggtgcagtctggggctgaggtgaagaagcctggggcctcagtgaaggtctcctgcaaggtttccggatacttcctctctaaattatccatgcactgggtgcgacaggctcctggaaaggggcttgagtggatgggaggcttcaatcctggagaaggtgaaacaatctacgcacagaggttccagggcagagtcaccattaccgaggacatttccacagacacagcctacatggaactgagcagcctgagatctgaggacacggccgtgtatttttgtgcaacgggtataacagtggttagcgtgtatcttgactactggggccagggaaccc

SEQ ID NO: 720 - DNA, 459 bp, Homo sapiens
caggtgcagctggtgcagtctggggctgagatgaagaagcctggggcctcagtgaaggtctcctgcaagacttctggatacaccttcaccgactactatttccactggctgcgacaggcccctggacaagggcttgagtggatgggatggctcgtccctaacactggtggcacaaactatgcactaaattttcagggcagggtcgccatgaccagggacacgtccatcagcacagtctacatggaattgcgtcgcctcagatctgacgacacggccgtctattattgtgtgagagacggcggccggcggttgggcggcagctggtacccaaattttgacaagtggggccagggaacacttatcaccgtctcctcagcctccaccaaggcccatcggtcttccccctggcaccctcctccaagagcacctctggggcacagcgccctgggctgcctggtc

SEQ ID NO: 721 - DNA, 366 bp, Homo sapiens
caggtgcagctggtacaatctggggctgaagtgaagaagcctggggcctcagtgatggtctcctgcaaggcttctggatacaccttcatcgactactatatatactgggtgcgacaggcccctggacgagggcttgagtggatgggatggatcaaccctaacagaggtggcacaaagtatgcacagaagtttcgggaccgggtcaccatgaccagggacacggccgtcagcacggcctatatggaactgaacagcctgagatctgacgacacggccgtctactactgtgcgagacttcagagccttagtgggctttactctaacgctgactactggggccagggaacgctggtcaccgtctcctca

SEQ ID NO: 722 - DNA, 382 bp, Homo sapiens
caggtgcagctggtgcagtctggggctgaggtgaagaagcctggggcctcagtgaaggtctcctgcaaggcttctggatacaccttcatcgacttctatatacactgggtgcgacaggcccctggacaacgtcttgagtggatgggatggttcaatcctaacactggtggcgcacactctggactggactttcagggcagagtcaccatgaccggggacacgtccatcagcacagcctacatggaactgcccaggctggcatctgacgacacggccatttattactgtgcgagagagggacattgtcgtaccaccagctgccattttggcttctggggccagggagcactggtcaccgtctcctcagcctccaccaaggccc

SEQ ID NO: 723 - DNA, 371 bp, Homo sapiens
caggtgcagctggtgcagtctggggctgaggtgaagaagcctggggcctcagtgaaggtctcctgcaaggcctctggatacaccttcagcggctactactacattcactgggtgcgacaggcccctggacaagggcttgagtggatgggacggatcaatcctaacactggtggcacagactatgcacagaaatttcagggcagggtcaccatgaccagggacacgtccatgaacactctttacttagaattgagcaggctgacatctgacgacacggccgtttattactgtgcgacaattcagcggctggttaaggacttggactactggggccagggaacgctggtcaccgtctcctcagcctccaccaa

SEQ ID NO: 724 - DNA, 354 bp, Homo sapiens
caggtgcagctggtgcagtccggggttgaggtgaagaagcctggggcctcagtgaaggtctcctgcaaggtttccggatacttcctcagtaaaatttccatccactgggtgcgacaggctcctgaaaaagggctcgagtggatgggaggttttgatgctgaacaaggtgaaacagtctacgcacagaagttccagggcagagtcaccgtaaccgaggacacgtctacagacacagcctacatggacgtgagcagtctgagatctgaggacacggccgtttattactgtgcaacaggaatccgtgggcgtcctttgatatcgtggggccaagggacagtggtcaccgtctcttca

SEQ ID NO: 725 - DNA, 376 bp, Homo sapiens
caggtgcagctggtgcagtctgggcctgaggtgaagaagcctggggcctcagtgaaggtctcctgtaaggcttctggatacacctacaatacctactatatgcactgggtgcgacaggcccctggacaagggcttgagtggatgggatggatcaaccctaatagtggtggcacaaactatgcacagagatttcagaccagggtcgacatgaccaggggcacgtccataaacacagtctacatggagctgagcggactgacatctgacgacacggccgtgtattattgtgtgactgatttcaacgggggtagtagtttttccttttactacttttgacctacgtggggccagggaacgcgtggtcaccgtctcctca

SEQ ID NO: 726 - DNA, 386 bp, Homo sapiens
caggtgcagttggtgcaatctggggctgaagtgaagaagcctggggcctcagtgatggtctcctgcaaggcttctggatacaccttcatcgactactatatatactgggtgcgacaggcccctggacgagggcttgagtggatgggatggatcaaccctaacagaggtggcacaaagtatgcacagaagtttcgggaccgggtcaccatgaccagggacacggccgtcagcacggcctatatggaactgaacagcctgagatctgacgacacggccgtctactactgtgcgagacttcagagccttagtgggctttactctaacgctgactactggggccagggaacgctggtcaccgtctcctcacgcctccaccaacgggccca

SEQ ID NO: 727 - DNA, 364 bp, Homo sapiens
caggtgcagctggtgcaatctggggctgaggtgaagaagcctggggcctcagtgaaggtctcctgcaaaatttctggatacaccttcaccaagttctacatacactgggtgcgacaggcccctggacaagggcttgagtggttgggatggatcaaccctaacaatggtggcacaaagtctgcacagcagtttcagggcagggtcgccttgaccagggacacgtccctcagcacagcctatattgaactgagcagcctgacatctgacgacacggccgtttattactgtgcgagaggagattatgattacctttggggaaattatcgttttgaatactggggccagggaaccctggtcaccgtct

SEQ ID NO: 728 - DNA, 377 bp, Homo sapiens
caggtgcagctggtgcagtctggggctgaggtgaagaagcctggggcctcagtgaaggtctcctgccagacttctggatacacctccaccggccactatacacactgggtgcgacaggcccctggacaacgacctgagtggatgggatggatgaatcctaatagtggtggcacaacgtttgcaccgaaatttcagggcagagtcaccattaccaggaacacctccataagcacagcctacatggagctgagcagcctgagatctgaggacacggccgtgtattactgtgcgagaggaaagtgggagcaattgggcgcttttgatatctggggccaagggacaatggtcactgtctcttcagggagtgcatccgcccc

SEQ ID NO: 729 - DNA, 372 bp, Homo sapiens
caggtgcagctggtgcagtctggggcggaggtgaagaagcctggggcctcagtgaaggtctcctgccaggcctctggatacaccttcaccgactactatatacactggctgcgacaggcccctggacaagggcttgagtggatgggatggatgaatcctaatagtggtggcacaacgtttgcaccgaaatttcagggcagaatcaccatgaccagggacacgtccaccagcacagcctacttggaggtgaggggtctgagggctgacgacacggccgtctattactgtgcgagagactattgtagtggggtttctgccactacttctttgactccgtggggccagggaaccctggtccaccgtctcctcacg

SEQ ID NO: 730 - DNA, 372 bp, Homo sapiens
caggtgcagctggtgcagtctgggcctgaggtgaagaagcctggggcctcagtgaaggtctcctgtaaggcttctggatacacctacaatacctactatatgcactgggtgcgacaggcccctggacaagggcttgagtggatgggatggatcaaccctaatagtggtggcacaaactatgcacagagatttcagaccagggtcgacatgaccagggacacgtccataaacacagtctacatggagctgagcggactgacatctgacgacacggccgtgtattattgtgtgactgatttcaacgggggtagtagttttccttttactactttgaccacgtggggccagggaacgctggtcaccgtctcctca

SEQ ID NO: 731 - DNA, 376 bp, Homo sapiens
caggtgcagctggtgcagtctggggctgaggtgaagaagcctggggcctcggtgaaggtctcctgcaaggcttctggatacaccttcaccgactactttgtacactgggtgcgacaggcccctggacaaaattttgagtggatgggatggaccaacgtcaacactggtggcacaaagtatgcaccaaagtttcagggcagggtcaccatgaccagggacacgtccatcagcacagcctacattgaactgagcggcctgacatctgacgacacggccgtgtattactgtgcgagagatatgagcagcagctggaccaactggtacttcgatctctggggccctggcacctggtcactgtctcctcagcctccaccaa

SEQ ID NO: 732 - DNA, 384 bp, Homo sapiens
caggtgcagctggtgcagtctggggctgaggtgaagaagcctggggcctcagtgaaggtctcctgtaaggcttctggatacacctacatcaactactttatgcagtgggtgcgacaggcccctggacaagggcttgagtggatgggatggatcaaccctaacagtggtctcacaaactacgcacagaagtttcggggcagggtcaccatggccagggacacgtccatcaacacagcctacatggagttgaggggactgaggatctgacgacacggccgtctattactgtacttcctgcgaccggggtggtagtagatcgttacgatttacaaggggggggctacgtacggtatggacgtctggggccaagggaccacggtcacc

SEQ ID NO: 733 - DNA, 387 bp, Homo sapiens
caggtgcagctggtgcagtctggggctgaggtgaagaagcctggggcctcagtgaaggtctcctgcgagacttctggatacaccttcagcggcttctatttgcactgggtgcgacaggcccctggacaagggcttgagtgggtgggctggatcaacccttacagtggtggcaccgactatgcacagaagtttcagggcagggttaccatgaccctagacacgtccatcagcacagcctacatggaattggacggcctcagatctgacgacacggccattttattattgtgcgagaggatatcaaccccgatcccccgtaattcgatttcttgactgggccgtaggttcgacccctggggccaggggaccctggtcatcgtctcctca

SEQ ID NO: 734 - DNA, 366 bp, Homo sapiens
caggtgcagctggtgcagtctggggctgaggtgaagaagcctggggcctcagtgaaggtctcctgcaaggcttctggatacaccttcaccgacttctatatacgctgggtgcgacaggcccctggacaacgtcttgagtggatgggatggttcaatcctaacactggtggcgcacactctggactggactttcagggcagagtcaccatgaccggggacacgtccatcagcacagcctacatggaactgcccaggctggcatctgacgacacggccatttattactgtgcgagagagggacattgtcgtaccaccagctgccattttgacttctggggccagggagcactggtcaccgtctcctca

SEQ ID NO: 735 - DNA, 364 bp, Homo sapiens
caggtgcagctggtgcagtctggggctgaggtgaggaagcctggggcctctgtgagggtctcctgcaagacttctggatacaccttcaccggctactatatacactgggtgcgacaggcccctggacaagggcttgagtggatgggatggattaatcctgacactggtgccacaaagtattcacagaagtctcagggcagggtctccatgaccagggacacgtccatcagcacagcctacatggaactgaacaggttgatgtctgacgacacggccttctattactgtgcgagacgaccccaagacggcagcagctggtacacgcactggggccagggaacgctggtcaccgtctctacacgcc

SEQ ID NO: 736 - DNA, 366 bp, Homo sapiens
caggtgcagctggtgcagtctggggctgaggtaaagaagcctggggcctcggtgaaggtctcctgcaaggcttctggatacaccttcatcgactactacatatactgggtgcggcaggcccctggacaagggcttgagtggatgggatggatcaaccctaacagaggtggcaccaagtatgcacagaagtttcagggcagggtcaccttgaccagggacacggccgtcaccacggcctatctggaggtgaacagcctgagatctgacgacacggccgtctattattgtgcgagactacaaagccttcatggattttactctaacgctgactactggggccagggaacgctggtcaccgtctcctca

SEQ ID NO: 737 - DNA, 366 bp, Homo sapiens
caggtgcagctggtgcagtctggggctgaggtgaagaagcctgggtcgtcagtgaaggtctcctgcaaggcttctggatacaccttcatcgactactacatatactgggtgcggcaggcccctggacaagggcttgagtggatgggatggatcaaccctaacagaggtggcaccaagtatgcacagaagtttcagggcagggtcaccttgaccagggacacggccgtcaccacggcctatctggaggtgaacagcctgagatctgacgacacggccgtctattattgtgcgagactacaaagccttcatggattttactctaacgctgactactggggccagggaacgctggtcaccgtctcctca

SEQ ID NO: 738 - DNA, 415 bp, Homo sapiens
caggtgcagctggtgcagtctgggcctgaggtgaggaagcctggggcctcagtgaaggtctcctgcgaggcttccggatacaccttcaccggctactatatacactgggtgcgacaggcccctggacaaggccttgagtggatgggatggatcaatcctaacaatgatggcacaacctatgcacacaaatttcagggcagggtcaccgtgaccagggacacgtccattagtacggcctacatggagctgagcggactgagatctgacgacacggccatttattactgtgcgagagcgccatacagcgcactatacttctacatggacgtctggggcaaagggaccacggtcaccgtctcctcagggagcgcatccgccccaacccttttccccctcgtctcctctgagaattccc

SEQ ID NO: 739 - DNA, 380 bp, Homo sapiens
caggtgcagctggtgcagtctggggctgaagtgaagaagcctggggcctcagtgaaggtctcctgcaagacttctggatacagcttcaccggcaactatatacactgggtgcgccaggcccctggacaagggcttgagtggatgggatggatcaaccctaatagtggtggctcaaagtctccacagaagtttcagggcagggtcaccatgaccagggacacgtccgtcagtacagtttacatggaattgaccaggctgaaatttgacgacacggccatatattactgtacgaaagattatggcatgttgggatctactctacccgaatacttccaacactggggccagggcaccctggtcaccgtctcctcacgcctcca

SEQ ID NO: 740 - DNA, 392 bp, Homo sapiens
caggtgcagctggtgcagtctggggctgaagtgaagaagcctggggcctcagtgaaggtctcctgcaaggcttctggatacatcttcaacaactactttttgcactgggtgcgacaggcccctggacaggggcttgagtggatggggtggatcaaccctaacactgctggcacaaactatgcatacaactttcggggcagggtcagcatgaccagggacacgtccaccggaacagcctacatggagctgagcaggctgagatctgacgacacggccgtgtatttctgtgcttcatgcgagcgggtggtagttggtgttacgacgttaggacgggggggtctacgtacgccatggacgtcgtggggccaagggaccacggtcgccgtctcctc

SEQ ID NO: 741 - DNA, 421 bp, Homo sapiens
caggtgcagctggtgcagtctggggctgaagtgaagaatcctggggcctcagtgaaggtctcctgcaagacttctggatacaccttcaccgtccactatattcattgggtacgacaggcccctggacaagggcttgagtggatgggatggatcaaccctaacagtggtgacacggactatgctcagaaatttcagggcagggtcaccatgaccagggacacgcccatcaacgctgcctatttggacttgagtaggctgagatctgacgacacggccgtttattactgtgcaagagatcgatattatgatagtagtggttaccctgatgcttttgatatttggggccaagggacgatggtgaccgtctcttcagggagtgcatccgcccaaccctttcccctcgtctcctctgagaattccc

SEQ ID NO: 742 - DNA, 373 bp, Homo sapiens
caggtgcagctggtgcagtctggggctgaggtgaagaagcctggggcctcagtgatggtctcctgcaaggcttctggatacaccttcatcgactactacatatactgggtgcggcaggcccctggacaagggcttgagtggatgggatggatcaaccctaacagaggtggcaccaagtatgcacagaagtttcagggcagggtcaccttgaccagggacacggccgtcaccacggcctatctggaggtgaacagcctgagatctgacgacacggccgtctattattgtgcgagactacaaagccttcatggattttactctaacgctgactactggggccagggaacgctggtcaccgtctcctcacgcctcc

SEQ ID NO: 743 - DNA, 399 bp, Homo sapiens
caggtgcagctggtgcagtctggggctgaggtgaagaagcctggggcctcagtgaaggtctcctgcaaggcttctggatacagtttcaccacctactctatatactgggtgcgacaggcccctggacaagggcctgagtggatgggatggatcagccctaacagtggtggcacaaactacgcacagaagtttcagggcagggtcaccatgaccagggacacgtccatcaacacagcctacatggacctgaccaggctgacatctgacgacacggccatgtattattgtacggcacggcctataactggaagtgcttttgatatctggggccaagggacaatggtctccgtctcttcagggatgcatcccgcccaacccttttcccctcgtctcctctga

SEQ ID NO: 744 - DNA, 408 bp, Homo sapiens
caggtgcagctggtgcagtctggggctgaggtgaagaagcctggggcctcagtgaaggtctcctgcaaggcttctggatacagtttcaccacctactctatatactgggtgcgacaggcccctggacaagggcctgagtggatgggatggatcaaccctaacagtggtggcacaaactacgcacagaagtttcagggcagggtcaccatgaccggggacacgtccatcaacacggcctacatggacctgaccaggctgacatctgacgacacggccatgtattattgtacggcacggcctataactggaagtgcttttgatatctggggccaagggacaatggtctccgtctcttcagggagtgcatccgccccaacccttttcccctcgtctcctctgagaattccc

SEQ ID NO: 745 - DNA, 366 bp, Homo sapiens
  misc_feature (319)..(319): n is a, c, g, or t
caggtgcagctggtgcagtctggggctgaggtgaagaagcctggggcctcagtgatggtctcctgcaaggcttctggatacaccttcatcgactactacatatactgggtgcggcaggcccctggacaagggcttgagtggatgggatggatcaaccctaacagaggtggcaccaagtatgcacagaagtttcagggcagggtcaccttgaccagggacacggccgtcaccacggcctatctggaggtgaacagcctgagatctgacgacacggccgtctattattgtgcgagactacaaagccttcatggattttacnctaacgctgactactggggccagggaacgctggtcaccgtcgcctca

SEQ ID NO: 746 - DNA, 481 bp, Homo sapiens
caggtgcagctggtgcagtctggggctgaggtgaagaagcctggggcctcagtgatggtctcctgcaaggcttctggatacaccttcatcgactactacatatactgggtgcggcaggcccctggacaagggcttgagtggatgggatggatcaaccctaacagaggtggcaccaagtatgcacagaagtttcagggcagggtcaccttgaccagggacacggccgtcaccacggcctatctggaggtgaacagcctgagatctgacgacacggccgtctattattgtgcgagactacaaagccttcatggattttactctaacgctgactactggggccagggaacgctggtcaccgtctcctcagcctccaccaaggcccatcggtcttccccctggcaccctcctccaagacgcacctctggggcacagcagccctgggctgcctggtcaaggactactcccgaaccggtgacggtgt

SEQ ID NO: 747 - DNA, 345 bp, Homo sapiens
caggtgcagctggtgcagtctggggctgaggtgaagaaacctggggcctcagtgaaggtctcctgccagggttctggatataccttcaccgactactatataaactgggtgcgacaggcccctggacaagggcttgagtggatgggttggatcaactctaacagtggtggcacatcttatgcacagaagtttcagggcagggtcaccatgaccagggacacttccatcagcacagtctacatggaattgagtggactgacatcagacgacacggccgtttattattgtgcgagagtgagtcccccggacgtctggggcaaagggaccacggtcaccgtctcttca

SEQ ID NO: 748 - DNA, 370 bp, Homo sapiens
caggtgcagttggtgcagtctggggctgaggtgaagaagcctggggcctcagtgagggtctcctgcaaggcttctggatacatcttaagcgcctactctatgcactgggtgcgacaggcccctggacaagggcttgagtggatgggatggatcaaggctaacagtgatggcacaaactatgcacagaagtttttcggcagggtcaccatgacccgggacacgtccagcagtacagcctatatggagttgactgggctgagatctgacgacacggccatatattactgtgcgagagcttacgggagttacgcagaatactgcctccactggggccagggcacccttgtcaccgtctcctcacgcctccacc

SEQ ID NO: 749 - DNA, 369 bp, Homo sapiens
caggtgcagctggtgcagtctggggctgaggtgaagaaacctggggcctcagtgaaggtctcctgccagggttctggatataccttcaccgactactatataaactgggtgcgacaggcccctggacaagggcttgagtggatgggttggatcaactctaacagtggtggcacatcttatgcacagaagtttcagggcagggtcaccatgaccagggacacttccatcagcacagtctacatggaattgagtggactgacatcagacgacacggccgtttattattgtgcgagagtgagtcccccggacgtctggggcaaagggccacggtcaccgtctcttcagcctccaccaaggcccatcggtctt

SEQ ID NO: 750 - DNA, 415 bp, Homo sapiens
caggtgcagctggtgcagtctggggctgaggtgaagaagcctggggcctcagtgatggtctcctgcaaggcttctggatacaccttcatcgactactacatatactgggtgcggcaggcccctggacaagggcttgagtggatgggatggatcaaccctaacagaggtggcaccaagtatgcacagaagtttcagggcagggtcaccttgaccagggacacggccgtcaccacggcctatctggaggtgaacagcctgagatctgacgacacggccgtctattattgtgcgagactacaaagccttcatggattttactctaacgctgactactggggccagggaacgctggtcaccgtctcctcagcctccaccaacgggcccatcggtcttccccctggccaccctcctccaa

SEQ ID NO: 751 - DNA, 361 bp, Homo sapiens
caggtgcagctggtgcagtctggggctgaggtgaagaagcctggggcctcagtgaaggtctcctgcaaggcctctggatacaccttcagcggctactactacattcactgggtgcgacaggcccctggacaagggcttgagtggatgggacggatcaatcctaacactggtggcacagactatgcacagaaatttcagggcagggtcaccatgaccagggacacgtccatgaacactctttacttagaattgagcaggctgacatctgacgacacggccgtttattactgtgcgacaattcagcggctggttaaggacttggactactggggccagggaacgcgtggtcaccgtctcctca

SEQ ID NO: 752 - DNA, 363 bp, Homo sapiens
caggtgcagctggtgcagtctgggcctgaggtgaagaagcctggggcctcagtgaaggtctcctgtaaggcttctggatacacctacaatacctactatatgcactgggtgcgacaggcccctggacaagggcttgagtggatgggatggatcaaccctaatagtggtggcacaaactatgcacagagatttcagaccagggtcgacatgaccagggacacgtccataaacacagtctacatggagctgagcggactgacatctgacgacacggccgtgtattattgtgtgactgatttcgaacgggggtataggttttccactacatggacgtcgtggggcaaagggccacggtcatcgtct

SEQ ID NO: 753 - DNA, 353 bp, Homo sapiens
caggtgcagctggtgcagtctggggctgaggtgaagaagcctggggcctcagtgaaggtctcctgcaaggcttctggatacagcttcaccggtcagtatatacactgggtgcgacaggcccctggacaggggcttgagtggatgggaatgataaactgtaacaatggtggcacaaagattgcacagaaatttcagggcagggtcaccctgaccagggacacgtccatcagcacagcctacatggaactgagcagcctgagatctgacgacctggccgtgtatttctgtacgagagccatagtgggttctgagggtgacttctggggccagggaacgctggtcaccgtctcctc

SEQ ID NO: 754 - DNA, 378 bp, Homo sapiens
  misc_feature (311)..(311): n is a, c, g, or t
caggtgcagctggtgcagtctgggcctgaggtgaagaagcctggggcctcagtgaaggtctcctgtaaggcttctggatacacctacaatacctactatatgcactgggtgcgacaggcccctggacaagggcttgagtggatgggatggatcaaccctaatagtggtggcacaaactatgcacagagatttcagaccagggtcgacatgaccagggacacgtccataaacacagtctacatggagctgagcggactgacatctgacgacacggccgtgtattattgtgtgactgatttcaacgggggtanagttttcctttactactttgaccactggggccagggaacgctggtcaccgtctcctcagcctccacc

SEQ ID NO: 755 - DNA, 365 bp, Homo sapiens
caggtgcagctggtgcagtctggggctgagatgaagaagcctggggcctcagtgaaggtctcctgcaagtctactggatactccctcaccggctactatatgcactgggtgcgacaggcccctggacaagggcttgagtggatgggatggatcaaccctaacaatggtgccacaaactatgcacagaagtttcatgacagggtcaccatgacccgggacacgtccatcagtgcagtctacatggagttgaataggctgaagtctgaagacacggccatgttatttttgtgcgagacccatggatgaactccaccactactatttttgactacgtggggtcagggaacgctggtcgccgtctcctc

SEQ ID NO: 756 - DNA, 364 bp, Homo sapiens
caggtgcagctggtgcagtctggggctgaggtgaagaagcctggggcctcagtgaaggtctcctgccaggcttctggatataccatcaccacttatgatttcaactgggtgcgacaggcccctggacaagggcttgagtggatgggatggatcaaccctcacagtggtggcacaaactatgcacagcactttcagggcagggtcaccatgaccagggacacgtccatcaacacagtctacatggacctgagcaggctgacatctgacgacacggtccttttattctgtgcgagagataataattgggaccgaagatgacaactggttcgaccctggggccagggaaccctggtcaccgtctcct

SEQ ID NO: 757 - DNA, 357 bp, Homo sapiens
caggtgcagctggtgcagtctggggctgaggtgaagaagcctggggcctcagtgaaggtctcctgcaaggcttctggatacatcttcgccggctactatatggagtgggtgcggcagacccctggacaagggcttgagtggatgggatggatcgaccctagaagtggtggcacaaattatgctcagaagtttcagggcagggtcaccctgaccagggacacgtccctccggacagcctatatggagttgagcagcctcagatctgacgacacggccgtctattattgtgcgacagataacggcagcggtatcttctggggcaagggaacggtggtcaccgtctccgcagcctccacc

SEQ ID NO: 758 - DNA, 380 bp, Homo sapiens
caggtgcagctggtgcagtctggggctgaggtgaagaagcctggggcctcagtgaaggtctcctgcaaggcctctggatacagtttcagcgactaccatatacactgggtgcgacaggcccctggacaagggcttgagtggatgggatggatcaaccagaatgggtggtggcgcaacgacatgtacagaagttccagggcagggtcgccatgaccaggggacacgtccatcagcacagcctttatggagctgagcaggctgagatttgacgacacggccatatattattgtgcgagagattattacgatgttttgactacttattctcattacttctttgacttatggggccagggaacgctggtcaccgtcatacgtgg

SEQ ID NO: 759 - DNA, 369 bp, Homo sapiens
caggtgcagctggtgcagtctggggcagaggtgaagaagcctggggcctcagtgaaggtctcctgcaaggcttctggatacaccttcaccggctactatatgcactgggtgcgacaggcccctggacaagggcttgagtggatgggatggatcaaccctaacagtggtggcacaaactatgcacagaaatttcaggacagagtcacatttaccacggacgaatcgaagactacagcctacatggagttgagcagcctgagatctgaggattcggccgtctattactgtgcgataaataccgactcagtggctacctctttgtacagtttgggcgtctggggccaagggaccacggtcaccgtctcctca

SEQ ID NO: 760 - protein, 121 aa, Homo sapiens
QVQLVQSGAVIKTPGSSVKISCRASGYNFRDYSIHWVRLIPDKGFEWIGWIKPLWGAVSYARQLQGRVSMTRQLSQDPDDPDVGVAYMEFSGLTPADTAEYFCVRRGSCDYCGDFPWQYWG

SEQ ID NO: 761 - protein, 147 aa, Homo sapiens
QVQLVQSGAVIKTPGSSVKISCRASGYNFRDYSIHWVRLIPDKGFVWIGWIKPLWGAVSYARQLQGRVSMTRQLSQDPDDPDWGVAYMEFSGLTPADTAEYFCVRRGSCDYCGDFPWQYWGQGTVVVVSSASTKAHRSSPGHPPPRR

SEQ ID NO: 762 - protein, 144 aa, Homo sapiens
QVQLVQSGAVIKTPGSSVKISCRASGYNFRDYSIHWVRLIPDKGFEWIGWIKPLWGAVSYARQLQGRVSMTRQLSQDPDDPDWGVAYMEFSGLTPADTAEYFVRRGSCDYCGDFPWQYWGQGTVVVVSSAPTKAHRSSPWPPSS

SEQ ID NO: 763 - protein, 130 aa, Homo sapiens
QVQLVQSGAVIKTPGSSVKISCRASGYNFRDYSIHWVRLIPDKGFEWIGWIKPLCGAVSYARQLQGRVSMTRQLSQDPDDPDWGVAYMEFSGLTPADTAEYFVSGEGPVIIAETFPGNTWGQGTVVVVSS

SEQ ID NO: 764 - protein, 133 aa, Homo sapiens
QVQLVQSGAVIKTPGSSVKISCRASGYNFRDYSIHWVRLIPDKGFEWIGWIKPLWGAVSYARQLQGRVSMTRQLSQDPDDPDWGVAYMEFSGLTPADTAEYFCVRRGSCDYCGDFPWQYWGQGTVVVVSSAST

SEQ ID NO: 765 - protein, 133 aa, Homo sapiens; identical to SEQ ID NO: 764

SEQ ID NO: 766 - protein, 133 aa, Homo sapiens; identical to SEQ ID NO: 764

SEQ ID NO: 767 - protein, 126 aa, Homo sapiens
QVQLVQSDADLRKPGASVKVSCKASGYIFKNQYIHWVRQAPGRGFEWMGHLNPWSGGTVYAQKFQDRLSMTRDMSTSTAYMELRSLTSDDTANYFCLTAIIDVVYWGQGTVVTVSSASTKGPSVFP

SEQ ID NO: 768 - protein, 122 aa, Homo sapiens
QVQLVQSGTEVKKSGASLKISCMTAGYTFSAHYIHWVRQAPGQGLEWMGWINPATGDTKFVQTFQGRLAMTRDTTTDTVNLILASVKPNDTATYYCARDWQFQVTFGDFYMDIWGNGTTVIV

SEQ ID NO: 769 - protein, 133 aa, Homo sapiens
QVQLVQSDADLRNPGASVKVSCKASGYIFKNQYIHWVRQAPGQGFEWMGHLNPWSGGTVYAQKFQDRLSMTRDMSTSTAYMELRSLTSDDTANYFCSLQLVSSTWGQGTVVTVSSASTKGPSVLPLGHPPPTT

SEQ ID NO: 770 - protein, 115 aa, Homo sapiens
QVQLVQSDADLRNPGASVKVSCKASGYIFKNQYIHWVRQAPGQGFEWMGHLNPWSGGTVYAQKFQDRLSMTRDMSTSTAYMELRSLTSDDTANLLLLTAILVSSTWGQGTWSPSP

SEQ ID NO: 771 - protein, 131 aa, Homo sapiens
QVQLVQSGADVKKPGTSVKVSCKASGDAFSDYYLHWVRQVPGQGLEWMGWMDPNNGATNYAPKFQGMIIMTRDTSINTVYLELRRLRSDDTAVYFCTRDASGPQTYYYDSSGFEFDSWGQGTLVIVSSAST

SEQ ID NO: 772 - protein, 122 aa, Homo sapiens
QVQLVQSGTEMKKSGASLKVSCKTSGYTFSAHYIHWVRQAPGQGLEWMGWINPDSGATKFGQAFQGRISMTRDTSTDTVNLLLVNLRPNDTATYYCARDWQFQVTFGDFYMDIWGNGTTVIV

SEQ ID NO: 773 - protein, 127 aa, Homo sapiens
QVQLVQSGTEMKKSGASLKVSCKTSGYTFSAHYIHWVRQAPGQGLEWMGWINPDSGDTNFAQTFQGRTTLTRDAFANTVNLLLASLKPNDTATYYCARDWQFQGTFGDFYMDIWGNGTTVIVSPAST

SEQ ID NO: 774 - protein, 145 aa, Homo sapiens
QVQLVSGTEMKKSGASLKVSCKTSGYTFSAHYIHWVRQAPGQGLEWMGWINPDSGDTNFAQTFQGRTTLTRDAFANTVNLLLASLKPNDTATYYCARDWQFQGTFGDFYMDIWGNGTTVIVSQPPPGPSVFPWPPSSKTHLVGAR

SEQ ID NO: 775 - protein, 130 aa, Homo sapiens
QVQLVQSGTEMKKSGASLKVSCKTSGYTFSAHYIHWVRQAPGQGLEWMGWINPDSGDTNFAQTFQGRTTLTRDAFANTVNLLLASLKPNDTATYYCARDWQFQGTFGDFYMDIWGNGTTVIVSPASTNGP

SEQ ID NO: 776 - protein, 122 aa, Homo sapiens
QVQLVQSGTEMKKSGASLKVSCKTSGYTFSAHYIHWVRQAPGQGLEWMGWINPDSGDTNFAQTFQGRTTLTRDAFANTVNLLLASLKPNDTATYYCARDWQFQVTFGDFYMDIWGNGTTVIV

SEQ ID NO: 777 - protein, 153 aa, Homo sapiens
QVQLVQSGTEMKKSGASLKVSCKTSGYTFSAHYIHWVRQAPGQGLEWMGWINPDSGDTHFAQTFQVRTTLTRDPFTGTVILLLASLRPNDTATYYCARDWQFQGTFGDFYMDIWGNGTTVIVSPASTRAHRSSPGTLLQDAPLGHSGPGCLVR

SEQ ID NO: 778 - protein, 152 aa, Homo sapiens
QVQLVQSGTEMKKSGASVKVSCETSGYTFTAYYIHWVRQAPGRGLEWMGWINPDSGDTKFARTFQGRTTVTRDTSTNTVNLLLASLQSNDTATYYCARDWQFQVTFGDYYMDIWGNGTTVIVSPASTKAHRSSPGTLLQDAPLGHSGLGCLV

SEQ ID NO: 779 - protein, 144 aa, Homo sapiens
QVQLVQSGTKMMKSGASMKVPCKTSGYTFTAYYIHWVRQAPGRGLEWMGWINPDSGDTNFAQTFKDRVNMTRDTSTTTVNLVLVNLRSDDTATYYCARDWQYQVIFGDFYLDIWGNGTTVIVVSSLHQGPSVFPLATLLQRRHL

SEQ ID NO: 780 - protein, 120 aa, Homo sapiens
QVQLVQSGAEVKKTGASVRVSCETSGYPFTNHYIHWVRQAPGHGLEWMAWINPSGGATIYAEAFEGRIMVSSDTSLNTVYMELESLTSGDTAMYFCARDATPITTEFDFWGQGTLITVSS

SEQ ID NO: 781 - protein, 120 aa, Homo sapiens; identical to SEQ ID NO: 780

SEQ ID NO: 782 - protein, 120 aa, Homo sapiens
QVQLVQSGAEVKKPGASVKVSCQASGYRFTDQHLNWIRQAPGQGFEWLGRFNPANGGTDLAQKFQGRVSMTRNMSITTAYLELSRLTSDDTATYYCLNSGWTNEYHYDHWGQGTPVTVSS

SEQ ID NO: 783 - protein, 139 aa, Homo sapiens
QVQLVQSGAEVKKTGASVRVSCETSGYPFTNHYIHWVRQAPGHGLEWMAWINPSGGATIYAEAFEGRIMVSSDTSLNTVYMELESLTSGDTAMYFCARDATPITTEFDFWGQGHSPSPQPPPRPIGPSPSATLLQRRHL

SEQ ID NO: 784 - protein, 123 aa, Homo sapiens
QVQLVQSGAEVKKPGASVKVSCQASGYRFTDQHLNWIRQAPGQGFEWLGRFNPANGGTDLAQKFQGRVSMTRNMSITTAYLELSRLTSDDTATYYCLNSGWTNEYHYDHWGQGTPVTVSSRLH

SEQ ID NO: 785 - protein, 142 aa, Homo sapiens
QVQLVQSGTEVKKSGASVKVSCQTSGYTFSAYYIHWVRQAPGRGLEWLGWINPDNGDTKFAQNFHGRSTVTRDTSTSTVNLLLTSLQPNDTATYYCARDWQFQVIFGDYYMDIWGNGTTVIVSPASTKAHRSPPGHPPPTTH

SEQ ID NO: 786 - protein, 124 aa, Homo sapiens
QVQLVQSGTEVKKSGASVKVSCQTSGYTFSAYYIHWVRQAPGRGLEWLGWINPDNGDTKFAQNFHGRSTVTRDTSTSTVNLLLTSLQPNDTATYYCARDWQFQVIFGDYYMDIWGNGTTVIVSS

SEQ ID NO: 787 - protein, 120 aa, Homo sapiens
QVQLVQSGAEVKKPGASVKVSCQASGYRFTDQHLNWIRQAPGQGFEWLGRFNPANGGTDLAQKFQGRVSMTRNMSITTAYLELSRLTSDDTATYYCLNSGRMNITMTTWGQGTAGHRLLT

SEQ ID NO: 788 - protein, 127 aa, Homo sapiens
QVQLVQSGTEMKKSGASMKVSCKTSGYTFTGYYIHWVRQAPGRGLEWMGWINPNNGDTNFAQSFKDRVSMTRDTSTTTVNLVLANLRNDDTATYYCARDWQYQVIFGDFYLDIWGNGTTIIVSPAST

SEQ ID NO: 789 - protein, 115 aa, Homo sapiens
QVQLVQSGAEVKKPGASVKVSCQASGYGFTDQHLNWIRQAPGQGFEWLGRFNPANGGTDLAQKFQGRVSMTRNMSITTAYLELSRLTSDDTATYYCLNSGRMNITMTTWGQGTAG

SEQ ID NO: 790 - protein, 122 aa, Homo sapiens
QVQLVQSGAEVKKPGAPVKVSCQASGYRFTDQHLNWIRQAPGQGFEWLGRFNPANGGTDLAQKFQGRVSMTRNMSITTAYLELSRLTSDDTATYYCLNSGRMNITMTTWGQGTPVTVSSRLH

SEQ ID NO: 791 - protein, 118 aa, Homo sapiens
QVQLVQSGAEVKKPGASVKASCQASGYRFTDQHLNWIRQAPGQGFEWLGRFNPANGGTDLAQKFQGRVSMTRNMSITTAYLELSRLTSDDTATYYCLNSGRMNITMTTWGQGTPVTVS

SEQ ID NO: 792 - protein, 120 aa, Homo sapiens
QVQLVQSGAEVKKPGASVKVSCQASGYRFTDQHLNWIRQAPGQGFEWLGRFNPANGGTDLAQKFQGRLSMTRNMSITTAYLELSRLTSDDTATYYCLNSGRMNITMTTWGQGTPVTVSSR

SEQ ID NO: 793 - protein, 117 aa, Homo sapiens
QVQLVQSGAEVKKPGASVKVSCQASGYRFTDQHLNWIRQAPGQGFEAGQVQPCQWRHRSCTEVSGVSMTRNMSITTAYLELSRLTSDDTATYYCLNSGRMNITMTTWGQGTPVTVSS

SEQ ID NO: 794 - protein, 121 aa, Homo sapiens
QVQLVQSGAEVKKPGASVKVSCQASGYRFADQHLNWIRQAPGQGFEWLGRFNPANGGTDLAQKFQGRVSMTRNMSITTAYLELSRLTSDDTATYYCLNSGRMNITMTTWGQGTAGHRLLTP

SEQ ID NO: 795 - protein, 122 aa, Homo sapiens
QVQLVQSGAEVKKPGASVKVSCQASGYRFTDQHLNWIRQAPGQGFEWLGRFNPANGGTDLAQKFQGRVSMTRNMSITTAYLELSRLTSDDTATYYCLNSGRMNITMTTWGQGTAGHRLLTPP

SEQ ID NO: 796 - protein, 123 aa, Homo sapiens
QVQLVQSGAEVKKPGASVKVSCQASGYRFTDQHLNWIRQAPGQGFEWLGRFNPANGGTDLAQKFQGRVSMTRNMSITTAYLELSRLTSDDTATYYCLNSGRMNITMTTWGQGTAGHRLLTPPP

SEQ ID NO: 797 - protein, 125 aa, Homo sapiens
QVQLVQSGAEVKKPGASVKVSCQASGYRFTDQHLNWIRQAPGQGFEWLGRFNPANGGTDLAQKFQGRVSMTRNMSITTAYLELSRLTSDDTATYYCLNSGRMNITMTTWGQGTPVTVSSRLHQRP

SEQ ID NO: 798 - protein, 121 aa, Homo sapiens
QVQLVQSGAEVKKPGASVKVSCQASGYRFTDQHLNWIRQAPGQGFEWLGRFNPANGGTDLAQKFQGRVSMTRNMSITTAYLELSRLTSDDTATYYCLNSGRMNITMTTWGQGTAGHRLLTP

SEQ ID NO: 799 - protein, 122 aa, Homo sapiens
QVQLVQSGAEVKKPGASVKVSCQASGYRFTDQHFELDTTGPWTRVVAGQVQPCQWRHRSCTEVSGVSMTRNMSITTAYLELSRLTSDDTATYYCLNSGRRMNITMTTWGQGTAGHRLLTPPP

SEQ ID NO: 800 - protein, 119 aa, Homo sapiens
QVQLVQSGAEVKKPGASVKVSCQASGYRFTDQHFELDTTGPWTRVVAGQVQPCQWRHRSCTEVSGVSMTRNMSITTAYLELSRLTSDDTATYYCLNSGRMNITMTTWGQGTAGHRLLTP

SEQ ID NO: 801 - protein, 126 aa, Homo sapiens
QVQLVQSGAEVKKPGASVKVSCQASGYRFTDQHLNWIRQAPGQGFEWLGRFNPANGGTDLAQKFQGRVSMTRNMSITTAYLELSRLTSDDTATYYCLNSGWTNEYHYDHWGQGTPVTVSSRLHQRA

SEQ ID NO: 802 - protein, 125 aa, Homo sapiens
QVQLVQSGAEVKKPGASVKVSCQASGYRFTDQHLNWIRQAPGQGFEWLGRFNPANGGTDLAQKFQGRVSMTRNMSITTAYLELSRLTSDDTATYYCLNSGWTNEYHYDHWGQGTPVTVSSRLHQR

SEQ ID NO: 803 - protein, 121 aa, Homo sapiens; identical to SEQ ID NO: 798

SEQ ID NO: 804 - protein, 134 aa, Homo sapiens
QVQLVQSGAEVKKPGASVKVSCQASGYRFTDQHLNWIRQAPGQGFEWLGRFNPANGGTDLAQKFQGRVSMTRNMSITTAYLELSRLTSDDTATYYCLNSGRMNITMTTWGQGTAGHRLLTPPPTAHVRSFPRRP

SEQ ID NO: 805 - protein, 120 aa, Homo sapiens
QVQLVQSGAEVKKPGASVKVSCQASGYRFTDQHFELDTTGPWTRVVAGQVQPCQWRHRSCTEVSGVSMTRNMSITTAYLELSRLTSDDTATYYCLNSGRMNITMTTWGQGTPVTVSSRLH

SEQ ID NO: 806 - protein, 123 aa, Homo sapiens; identical to SEQ ID NO: 796

SEQ ID NO: 807 - protein, 123 aa, Homo sapiens
QVQLVQSGAEVKKPGASVKVSCQASGYRFTDQHLNWIRQAPGQGFEWLGRFNPANGGTDLAQKFRGRVSMTRNMSITTAYLELSRLTSDDTATYYCLNSGWTNEYHYDHWGQGTPVTVSSRLH

SEQ ID NO: 808 - protein, 121 aa, Homo sapiens; identical to SEQ ID NO: 798

SEQ ID NO: 809 - protein, 121 aa, Homo sapiens
QVQLVQSGAEVKKPGASVKVSCQASGYRFTDQHLNWIRQAPGQGFEWLGRFNPANGGTDLAQKFQGRVSMTRNMSITTAYLELSRLTSDDTATYYCLNSGRMNITMTTWGQGTPVTVSSRL

SEQ ID NO: 810 - protein, 114 aa, Homo sapiens
QVQLVQSGAEVKKPGASVKVSCQASGYRFTDQHLNWIRQAPGQGFEWLGRFNPANGGTDLAQKFQGRVSMTRNMSITTAYLELSRLTSDDTATYYCLNSGWTNEYHYDHWGQGT

SEQ ID NO: 811 - protein, 120 aa, Homo sapiens; identical to SEQ ID NO: 782

SEQ ID NO: 812 - protein, 121 aa, Homo sapiens
QVQLVQSGAEVKKPGASVKVSCQASGYRFTDQHLNWIRQAPGQGFEWLGRFNPANGGTDLAQKFQGRVSMTRNMSITTAYLELSRLTSDDTATYYCLNSGWTNEYHYDHWGQGTAGHRLLT

SEQ ID NO: 813 - protein, 115 aa, Homo sapiens
QVQLVQSGAEVKKPGASVKVSCQASGYRFTDQHLNWIRQAPGQGFEWLGRFNPANGGTDLAQKFQGRVSMTRNMSITTAYLELSRLTSDDTATYYCLNSGRMNITMTTWGQGTPV

SEQ ID NO: 814 - protein, 119 aa, Homo sapiens
QVQLVQSGAEVKKPGASVKVSCQASGYRFTDQHLNWIRQAPGQGFEWLGRFNPANGGTDLAQKFQGRVSMTRNMSITTAYLELSRLTSDDTATYYCLNSGRMNITMTTWGQGTAGHRLL

SEQ ID NO: 815 - protein, 124 aa, Homo sapiens
QVQLVQSGAEVKKPGASVKVSCQASGYRFTDQHLNWIRQAPGQGFEWLGRFNPANGGTDLAQKFQGRVSMTRNMSITTAYLELSRLTSDDTATYYCLNSGWTNEYHYDHWGQGTPVTVSSRLHQ

SEQ ID NO: 816 - protein, 135 aa, Homo sapiens
QVQLVQSGAEVKKPGASVKVSCQASGYRFTDQHLNWIRQAPGQGFEWLGRFNPANGGTDLAQKFQGRVSMTRNMSITTAYLELSRLTSDDTATYYCLNSGWTNEYHYDHWGQGTAGHRLLTPPPTAHPVLPPSAT

SEQ ID NO: 817 - protein, 122 aa, Homo sapiens; identical to SEQ ID NO: 795

SEQ ID NO: 818 - protein, 121 aa, Homo sapiens
QVQLVSRGLKRSLGPQRSPVRLLDTDSPTNIIGYDRPPGQGFEWLGRFNPANGGTDLAQKFQGRVSMTRNMSITTAYLELSRLTSDDTATYYCLNSGWTNEYHYDHWGQGTPVTVSSRLHQ

SEQ ID NO: 819 - protein, 121 aa, Homo sapiens; identical to SEQ ID NO: 798

SEQ ID NO: 820 - protein, 118 aa, Homo sapiens
QVQLVQSGAEVKKPGASVKVSCQASGYRFTDQHLNWIRQAPGQGFEWLGRFNPANGGTDLAQKFQGRVSMTRNMSITTAYLELSRLTSDDTATYYCLNSGRMNITMTTWGQGTPVTVS

SEQ ID NO: 821 - protein, 120 aa, Homo sapiens
QVQLVQSGAEVKKPGASVKVSCQASGYRFTDQHLNWIRQAPGQGFEWLGRFNPANGGTDLAQKFQGRVSMTGNMSITTAYLELSRLTSDDTATYYCLNSGRMNITMTTWGQGTAGHRLLT

SEQ ID NO: 822 - protein, 135 aa, Homo sapiens
QVQLVQSGAEVKKPGASVKVSCQASGYRFTDQHLNWIRQAPGQGFEWLGRFNPANGGTDLAQKFQGRVSMTRNMSITTAYLELSRLTSDDTATYYCLNSGRMNITMTTWGQGTPVTVSSRLHQRAHVRSFPRRPP

SEQ ID NO: 823 - protein, 115 aa, Homo sapiens
QVQLVQSGAEVKKPGASVKVSCQASGYRFTDQHLNWIRQAPGQGFEWLGRFNPANGGTDLAQKFQGRVSMTRNMSITTAYLELSRLTSDDTATYYCLNSGRMNITMTTWGQGTAG

SEQ ID NO: 824 - protein, 123 aa, Homo sapiens; identical to SEQ ID NO: 796

SEQ ID NO: 825 - protein, 119 aa, Homo sapiens
QVQLVQSGAEVKKPGASVKVSCQASGYRFTDQHLDWIRQAPGQGFEWLGRFNPANGGTDLAQKFQGRVSMTRNMSITTAYLELSRLTSDDTATYYCLNSGRMNITMTTWGQGTAGHRLL

SEQ ID NO: 826 - protein, 119 aa, Homo sapiens; identical to SEQ ID NO: 814

SEQ ID NO: 827 - protein, 118 aa, Homo sapiens
QVQLVQSGAEVKKPGASVKVSCQASGYRFTDQHLNWIRQAPGQGFEWLGRFNPANGGTDLAQKVSGGQYDQKHVHHHSVFGTEQADIRHGHLLLSEFWLTNEYHYDHWGQGTPVTVSS

SEQ ID NO: 828 - protein, 123 aa, Homo sapiens; identical to SEQ ID NO: 784

SEQ ID NO: 829 - protein, 135 aa, Homo sapiens
QVQLVQSGAEVKKPGASVKVSCQASGYRFTDQHLNWIRQAPGQGFEWLGRFNPANGGTDLAQKFQGRVSMTRNMSITTAYLELSRLTSDDTATYYCLNSGWTNEYHYDHWGQGTPVTVSSRLHQRPIRSFPRRPP

SEQ ID NO: 830 - protein, 118 aa, Homo sapiens
QVQLVQSGAEVKKPGASVKVSCQASGYRFTDQHLNWIRQAPGQGFEWLGRFNPCQWRHRSCTEVSGGQYDQKHVHHHSVFGTEQADIRHGHLLLSEFWLTNEYHYDHWGQGTAGHRLL

SEQ ID NO: 831 - protein, 121 aa, Homo sapiens; identical to SEQ ID NO: 798

SEQ ID NO: 832 - protein, 123 aa, Homo sapiens; identical to SEQ ID NO: 796

SEQ ID NO: 833 - protein, 119 aa, Homo sapiens
QVQLVQSGAEVKKPGASVKVSCQASGYRFTDQHLNWIRQAPGQGFEWLGRFNPANGGTDLAQKFQGRVSMTRNMSITTAYLELSRLTSDDTATYYCLNSGRMNITMTTWGQGTPVTVSS

SEQ ID NO: 834 - protein, 122 aa, Homo sapiens; identical to SEQ ID NO: 795

SEQ ID NO: 835 - protein, 118 aa, Homo sapiens
QVQLVQSGAEVKKPGASVKVSCQASGYRFTDQHLNWIRQAPGQGFEWLGRFNPANGGTDLAQKFQGRVSMTRNMSITTAYLELSRLTSDDTATYYCLNSGRMNITMTTWGQGTAGHRP

SEQ ID NO: 836 - protein, 140 aa, Homo sapiens
QVQLVQSGAEVKKPGASVKVSCQASGYRFTDQHLNWIRQAPGQGFEWLGRFNPANGGTDLAQKFQGRVSMTRNMSITTAYLELSRLTSDDTATYYCLNSGRMNITMTTWGQGTPVTVSSRLHQRAHSGPSPSATRPPTTP

SEQ ID NO: 837 - protein, 148 aa, Homo sapiens
QVQLVQSGAEVKKPGASVKVSCKATGYRFTDYHLIWIRQAPGQGFEWVGRFNPANGVTNLAQKFQDRVSMTRNTSITTAYLELSRLTPDDTATYYCVNSGWDIDYHYDHWGQGTLVIVSSASTKAHRSSPWHPPPRAPLGHSSPGCLV

SEQ ID NO: 838 - protein, 126 aa, Homo sapiens
QVQLVQSGAEVKKPGASVKVSCKATGYRFTDYHLIWIRQAPGQGFEWVGRFNPANGVTNLAQKFQDRVSMTRNTSITTAYLELSRLTPDDTATYYCVNSGWDIDYHYDHWGQGTLVIVSSASTNGP

SEQ ID NO: 839 - protein, 150 aa, Homo sapiens
QVQLVQSGAEVKKPGASVKASCGTSGYTFANYYIHWLRQAPGQGLEWMAWINPGSGSTIYSENFEGRVTVTSDTSMQTVYMDLDSLTSRDTAVYYCARDATPPTTEFDHWGQGTLITVSSASTKGPSVFPLAPSSKSTSGAQRPWAAWSR

SEQ ID NO: 840 - protein, 141 aa, Homo sapiens
QVQLVQSGAEVKMLGASVKVSCQASGHKFTNYYIHWVRQAPGQGLEWMGWINPQNGDNNFGMRFQDRVTTTSDRSTRTVYLELSGLTPDDTAMYFCTRFLKPVEYYDRSGPQFGYWGQGTLVSVSSASTRPIGLPPGHPPP

SEQ ID NO: 841 - protein, 123 aa, Homo sapiens
QVQLVQSGAEVKKPGASVKVSCKATGYRFTDYHLIWIRQAPGQGFEWVGRFNPANGVTNLAQKFQDRVSMTRNTSITTAYLELSRLTPDDTATYYCVNSGWDIDYHYDHWGQGTLVIVSSAST

SEQ ID NO: 842 - protein, 134 aa, Homo sapiens
QVQLVQSGAEVKKPGASVKVSCGTSGYTFANYYIHWLRQAPGQGLEWMAWINPGSGSTIYSENFEGRVTVTSDTSMQTVYMDLDSLTSRDTAVYYCARDATPPTTEFDHWGQGTLITVSSASTNGPSGPSPSAT

SEQ ID NO: 843 - protein, 123 aa, Homo sapiens
QVQLVQSGAEVKKPGASVKVSCGTSGYTFANYYIHWLRQAPGQGLEWMAWINPGSGSTIYSENFEGRVTVTSDTSMQTVYMDLDSLTSRDTAVYYCARDATPPTTEFDHWGQGTLITVSSAST

SEQ ID NO: 844 - protein, 120 aa, Homo sapiens
QVQLVQSGAEVKKPGASVKVSCGTSGYTFANYYIHWLRQAPGQGLEWMAWINPGSGSTIYSENFEGRVTVTSDTSMQTVYMDLDSLTSRDTAVYYCARDATPPTTEFDHWGQGTLINRVL

SEQ ID NO: 845 - protein, 129 aa, Homo sapiens
QVQLVQSGAEVKKPGASVKVSCQASGHKFTNYYIHWVRQAPGQGLEWMGWINPQNGDNNFGMRFQDRVTTTSDRSTRTVYLELSGLTPDDTAMYFCTRFLKPVEYYDRSGPQFGYWGQGTLVSVSSAST

SEQ ID NO: 846 - protein, 120 aa, Homo sapiens
QVQLVQSGAEVKKPGASVKVSCGTSGYTFANYYIHWLRQAPGQGLEWMAWINPGSGSTIYSENFEGRVTVTSDTSMQTVYMDLDSLTSRDTAVYYCARDATPPTTEFDHWGQGTLITVSS

SEQ ID NO: 847 - protein, 125 aa, Homo sapiens
QVQLVQSGAQVLKPGASVKLSCKTSGYTFSDFYTHWVRQVPGRRLEWMGWFNPNSGGAHYGLDFQGRVTSAGDTSITTVYMELTRLAFDDTAIYYCAREAHCGTTSCQFDSWGQGTLVTVSSAST

SEQ ID NO: 848 - protein, 114 aa, Homo sapiens
QVQLVQFGADVEKPGASVRVSCKASGYDFINYYIHVRQAPGQGLEWMAWINPSGGATIYAESFEGRVTVTRDTSMSTVYMELESLTSGDTAMYYCARDATPITTEFVYWGQGTL

SEQ ID NO: 849 - protein, 122 aa, Homo sapiens
QVQLVQSGAEVKKPGSSVKVSCKASGGTFSSSAVNWVRQAPGKRLEWVGWFNPKTGGAHYGLDYQGRVTMTGDTSITTVYMELTRLASDDTAMYYCAREGVCRTTSCQFDFWGQGTLVTVFS

SEQ ID NO: 850 - protein, 117 aa, Homo sapiens
QVQLVQFGADVEKPGASVRVSCKASGYDFINYYIHWVRQAPGQGLEWMGCINPRTGDTKYAQRFQDEVSMTRDTSISTVYMELREMTYDDTAIYFCLTAIDGVSYWGLGKLVTVASA

SEQ ID NO: 851 - protein, 115 aa, Homo sapiens
QVQLVQFGADVEKPGASVRVSCKASGYDFINYYIHWVRQAPGQGLEWMGCINPRTGDTKYAQRFQDKVSMTRDTSISTVYMELREMTYDDTAIYFVSLQTVSPVWGLGKLVTVAS

SEQ ID NO: 852 - protein, 120 aa, Homo sapiens; identical to SEQ ID NO: 846

SEQ ID NO: 853 - protein, 120 aa, Homo sapiens
QVQLVQSGAEMMKPGASLKVSCQTSGYNFNGHFLHWVRQAPGQGLEWMARINPSSGVTDFAQKFQDRVTVTRDSLRQLQSTIGITAAIHGRVLLCERWDHFDLVFLTWGQGTRGHRLLSP

SEQ ID NO: 854 - protein, 119 aa, Homo sapiens
QVQLVQFGADVEKPGASVRVSCKASGYDFINYYIHWVRQAPGQGLEWMGCINPRTGDTKYAQRFQDKVSMTRDTSISTVYMELREMTYDDTAIYFCLTAIDGVSYWGLGKLVTVASAST

SEQ ID NO: 855 - protein, 120 aa, Homo sapiens
QVQLVQSDADLRNPGASVKVSCKASGYIFKNQYIHWVRQAPGQGFEWMGHLNPWSGGTVYAQKFQDRLSMTRDMSTSTAYMELSRLRFDDTAVYYCARDPQEVSGWYTHWGQGTLVTVSS

SEQ ID NO: 856 - protein, 119 aa, Homo sapiens
QVQLVQSGAEMMKPGASLKVSCQTSGYNFNGHFLHWVRQAPGQGLEWMARINPSSGVTDFAQKFQDRVTVTRDISTTTIYMELHRLRSDDTAVYYCARDGIISTGLFDWGQGTLVTVSS

SEQ ID NO: 857 - protein, 137 aa, Homo sapiens
QVQLVQSGAGVRKPGSSVMVSCKASGDTFNNYYIHWVRQAPGHGTKWMAWINPSGGATIYAEAFEGRVTVTTDTSMKTVYMELESLTSGDTAMYFCARDATPITTEFDYWGQGTLITVSSASTNGPLGPSPSATLLQ

SEQ ID NO: 858 - protein, 117 aa, Homo sapiens
QVQLVQFGADVEKPGASVRVSCKASGYDFINYYIHWVRQAPGQGLEWMGCINPRTGDTKYAQRFQDKVSMTRDTSISTVYMELREMTYDDTAIYFCLTAIDGVSYWGLGKLVTVASA

SEQ ID NO: 859 - protein, 174 aa, Homo sapiens
QVQLVQSGAEVKKPGASMKVSCQTSGYTFNSYYIHWMRQVPGQGLEWMGWINPNSGYTNYTQKFQGRVTMTRDTSINTAYLELSALRSDETAVYYCARDFSDGWPYSFDFWGQGTLVTVSSASTKGPSVFPWHPPPRAPLGAQRPWAAWSRTTSRTGDGVVELRRPDQRRAHLP

SEQ ID NO: 860 - protein, 122 aa, Homo sapiens
QVQLVQSGAEMMKPGASLKVSCQTSGYNFNGHFLHWVRQAPGQGLEWMARINPSSGVTDFAQKFQDRVTVTRDISTTTIYMELHRLRSDDTAVYYCARDGIISTGLFDWGQGTLVTVSSAST

SEQ ID NO: 861 - protein, 132 aa, Homo sapiens
QVQLVQSGSQMKKSGASLNVSCQTSGYTFSDYYLHWVRRAPGQGLQWMGWINPENGDTNYAQTFKGRVTMTRDTAINTAYMVLTGLKFNDTAMYYCARDWQFHVIFDDYYIDVWGTGTTVIVSSASTKGPSV

SEQ ID NO: 862 - protein, 122 aa, Homo sapiens
QVQLVQSGAQVLKPGASVKLSCKTSGYTFSDFYIHWVRQVPGRRLEWMGWFNPNSGGAHYGLDFQGRVTSAGDTSITTVYMELTRLAFDDTAIYYCAREAHCGTTSCQFDSWGQGTLVTVSS

SEQ ID NO: 863 - protein, 123 aa, Homo sapiens
QVQLVQSGAQVLKPGASVKLSCKTSGYTFSDFYIHWVRQVPGRRLEWMGWFNPNSGGAHYGLDFQGRVTSAGDTSITTVYMELTRLAFDDTAIYYCAREAHCGTTSCQFDSWGQGTRGHRLLT

SEQ ID NO: 864 - protein, 129 aa, Homo sapiens
QVQLVQSGAEVRKPGASVKVSCVASGYTLSDHFLHWVRRAPGHGLEWLGWTNPQNGFTNFAQDFQDRVTMTSDTSTGTAYMELNRLTSADTAIYYCARGAHRHSDRSGYYSEIDAWGQGTLVTVSSRLH

SEQ ID NO: 865 - protein, 137 aa, Homo sapiens
QVQLVQPGAEVKKPASSVKVSCQASRYTFTKYFTQWVRQGPGQGHEWLGCINPYNDNTHYAQKFWGRVTITSDRSVSTAYMELSSLRSEDMVVYSCVPWGNPTGDYYYYYYMDVWGKGTTVTVSSGCIRPTLSPRLL

SEQ ID NO: 866 - protein, 136 aa, Homo sapiens
QVQLVQSGAKIGKPGASVQVSCKASEYTFTDFYIHWVRQTPGQGLEWMGWINANTGATEFAQKFLGRIIMTRDTSINTVYMELSRLIFNDTAIYYCASAYASSGEFLYWGQGSRVTVSSGSASAPTLFPSSPLRIP

SEQ ID NO: 867 - protein, 118 aa, Homo sapiens
QVQLVQSGAEVKKPGASVKVSCGTSGYTFANYYIHWLRQAPGQGLEWMAWINPSGGSTIYSENFEGRVTVTRDTSMKTVYMELDSLTSGDTAVYYCARDATPVTTEFDYWGQGTLITV

SEQ ID NO: 868 - protein, 136 aa, Homo sapiens
QVQLVQSGAEIGKPGASVQVSCKASEYTFTDFYIHWVRQTPGQGLEWMGWINANTGATEFAQKFLGRIIMTRDTSINTVYMELSRLIFNDTAIYYCASAYASSGEFLYWGQGSRVTVSSGSASAPTLFPSSPLRIP

SEQ ID NO: 869 - protein, 123 aa, Homo sapiens
QVQLVQSGAEVKKPGASVKVSCGTSGYTFANYYIHWLRQAPGQGLEWMAWINPSGGSTIYSENFEGRVTVTRDTSMKTVYMELDSLTSGDTAVYYCARDATPVTTEFDYWGQGTLITVSSAST

SEQ ID NO: 870 - protein, 122 aa, Homo sapiens
QVQLVQSGAEVKKPGASVKVSCGTSGYTFANYYIHWLRQAPGQGLEWMAWINPSGGSTIYSENFEGRVTVTRDTSMKTVYMELDSLTSGDTAVYYCARDATPVTTEFDYWGQGTLITVSSRL

SEQ ID NO: 871 - protein, 121 aa, Homo sapiens
QVQLVQSGAEVKKPGASVKVSCGTSGYTFANYYIHWLRQAPGQGLEWMAWINPSGGSTIYSENFEGRVTVTRDTSMKTVYMELDSLTSGDTAVYYCARDATPVTTEFDYWGQGTLITVSSR

SEQ ID NO: 872 - protein, 120 aa, Homo sapiens
QVQLVQSGAEVKKPGASVKVSCGTSGYTFANYYIHWVRQAPGHGLEWMAWINPSGGSTIYAESFEGRVTVTADTSMKTVYMELESLTSGDTAMYFCARDATPMTTEFDYWGQGTLITVSS

SEQ ID NO: 873 - protein, 133 aa, Homo sapiens
QVQLVQSGAEVKKPGASVKVSCKASGYTFTDYFVHWVRQAPGQNFEWMGWTNVNTGGTKYAPKFQGRVTITADIPTNTAYLELSSLRSDDAAVYYCARGSILDMSTASSYYYVMDVWGQGTTVTVSSASTKGP

SEQ ID NO: 874 - protein, 120 aa, Homo sapiens
QVQLVQSGAEVKKPGASVKVSCGTSGYTFANYYIHWLRQAPGQGLEWMAWINPSGGSTIYSENFEGRVTVTRDTSMKTVYMELDSLTSGDTAVYYCARDATPVTTEFDYWGQGTLITVSS

SEQ ID NO: 875 - protein, 122 aa, Homo sapiens
QVQLVQSGAEVKKPGTSVKVSCKAFGYAFSDYYLHWVRQVPGQGLEWMGWMDPNNGATNYAPKFQGMIIMTRDTSHQYSLFGVEEAEIRRHGRLFLYGRCRRAPDVLLQWFEFDSWGQGTLV

SEQ ID NO: 876 - protein, 124 aa, Homo sapiens
QVQLVQSGSEVKKSGASVSVSCKASGYSFTDYYLHWVRQAPGQGLQWMGWINPESGDTNYARAFRGRITMTRDTSINTAYMMLTGLRSNDTAVYFCARDWQFHVIFDDYYIDAWGKGTTVIVSS

SEQ ID NO: 877 - protein, 122 aa, Homo sapiens
QVQLVQSGTDARKPGASVKVSCKASGYSFTDYYIHWVRQAPGKRLEWVGWFNPKTGGAHYGLDYQGRVTMTGDTSITTVYMELTRLASDDTAMYYCAREGVCRTTSCQFDFWGQGTLVTVSS

SEQ ID NO: 878 - protein, 121 aa, Homo sapiens
QVQLVQSGAEVKKPGASMRVSCQTSGYTFNSYYIHWMRQVPGQGLEWMGWINPNSGYTNYTQKFQGRVTMTRDTSINTAYLELSALRSDETAVYYCARDFSDGWPYSFDFWGQGTLVHRLL

SEQ ID NO: 879 - protein, 139 aa, Homo sapiens
QVQLVQSGAEVKKPGASVKVSCGTSGYTFTNYYIHWVRQAPGHGLEWMAWINPSGGATIYAEAFEGRVTVTTDTSMKTVYMELESLTSGDTAMYFCARDATPITTEFDYWGQGTLITVSSGSASAPTLFPLVLLRTSHT

SEQ ID NO: 880 - protein, 141 aa, Homo sapiens
QVQLVPSGAEVKKPGASMRVSCQTSGYTFNSYYIHWMRQVPGQGLEWMGWINPNSGYTNYTQKFQDRVTMTRDTSINTAYLELSALRSDETAVYYCARDFSDGWPYSFDFWGQGTLVTVSSRLHQRAHRSFPLATLLQRRH

SEQ ID NO: 881 - protein, 122 aa, Homo sapiens
QVQLVQSGTDARKPGASVKVSCKASGYSFTDYYIHWVRQAPGKRLEWVGWFNPKTGGAHYGLDYQGRVTMTGDTSITTVYMELTRLASDDTAMYYCAREGVCRTTSCQFDFWGQGTLVTVFS

SEQ ID NO: 882 - protein, 117 aa, Homo sapiens
QVQLVQSGTDARKPGASVKVSCKASGYSFTDYYIHWVRQAPGKRLEWVGWFNPKTGGAHYGLDYQGRVTMTGDTSITTVYMELTRLASDDTAMYYCAREGVELPAANLTSWGQGTRG

SEQ ID NO: 883 - protein, 135 aa, Homo sapiens
QVQLVQSGAEVKKPGASVKVSCGTSGYTFTNYYIHWVRQAPGHGLEWMAWINPSGGATIYAEAFEGRVTVTTDTSMKTVYMELESLTSGDTAMYFCARDATPITTEFDYWGQGTLITVSSASTKAHRSSPWPPSS

SEQ ID NO: 884 - protein, 122 aa, Homo sapiens
QVQLVQSGAEVKKPGASVKVSCGTSGYTFTNYYIHWVRQAPGHGLEWMAWINPSGGATIYAEAFEGRVTVTTDTSMKTVYMELESLTSGDTAMYFCARDATPITTEFDYWGQGTLITVSSRL

SEQ ID NO: 885 - protein, 125 aa, Homo sapiens
QVQLVQSGAEVKKPGASVKVSCGTSGYTFTNYYIHWVRQAPGHGLEWMAWINPSGGATIYAEAFEGRVTVTTDTSMKTVYMELESLTSGDTATYFCARDATPITTEFDYWGQGTLITVSSASTNG

SEQ ID NO: 886 - protein, 140 aa, Homo sapiens
QVQLVQSGTDARKPGASVKVSCKASGYSFTDYYIHWVRQAPGKRLEWVGWFNPKTGGAHYGLDYQGRVTMTGDTSITTVYMELTRLASDDTAMYYCAREGVCRTTSCQFDFWGQGTLVTVFSASTNGPIRSSPWPPSSND

SEQ ID NO: 887 - protein, 122 aa, Homo sapiens
QVQLVQSGAEVKKPGTSVKVSCKAFGYAFSDYYLHWVRQVPGQGLEWMGWMDPNNGATNYAPKFQGMIIMTRDTSINTVYMELRRLRSDDTAVYFCTRDAGGPQTYYYDSSGLNLTPWGQGT

SEQ ID NO: 888 - protein, 134 aa, Homo sapiens
QVQLVQSGAEVRKPGASVKVSCGTSGYTFANYYIHWVRQAPGHGLEWMAWINPSGGATIYAEAFEGRVTVTTDTSMKTVYMELESLTSGDTAMYFCARDATPITTEFDYWGQGTLITVSSRLHQRAHSGPSPSA

SEQ ID NO: 889 - protein, 120 aa, Homo sapiens
QVQLVQSGTDARKPGASVKVSCKASGYSFTDYYIHWVRQAPGKRLEWWGGSILRLVARTMDWTIRAERPGDTSITTVYMELTRLASDDTAMYYCAREGVCRTTSCQFDFWGQGTLVTVFS

SEQ ID NO: 890 - protein, 128 aa, Homo sapiens
QVQLVQSGAEVKKPGTSVKVSCKAFGYAFSDYYLHWVRQVPGQGLEWMGWMDPNNGATNYAPKFQGMIIMTRDTSINTVYLELRRLRSDDTAVYFCTRDAGGPQTYYYDSSGFEFDSWGQGTLVIVSS

SEQ ID NO: 891 - protein, 123 aa, Homo sapiens
QVQLVQSGAEVKKPGASVKVSCGTSGYTFANYYIHWLRQAPGQGLEWMAWINPSGGSTIYSENFEGRVTVTRDTSMKTAYMELDSLTSGDTAVYYCARDATPVTTEFDYWGQGTLITVSSRLH

SEQ ID NO: 892 - protein, 137 aa, Homo sapiens
QVQLVQSGAEVKKPGASVKVSCGTSGYTFTNYYIHWVRQAPGHGLEWMAWINPSGGATIYAEAFEGRVTVTTDTSMKTVYMELESLTSGDTAMYFCARDATPITTEFDYWGQGTLITVSSGSASAPTLFPSSPLRIP

SEQ ID NO: 893 - protein, 120 aa, Homo sapiens
QVQLVQSGAEVKKPGASVKVSCGTSGYTFTNYYIHWVRQAPGHGLEWMAWINPSGGATIYAEAFEGRVTVTTDTSMKTVYMELESLTSGDTAMYFCARDATPITTEFDYWGQGTLITVSS

SEQ ID NO: 894 - protein, 126 aa, Homo sapiens
QVQLVQSGAEVKKPGASVKVSCGTSGYTFTNYYIHWVRQAPGHGLEWMAWINPSGGATIYAEAFEGRVAVTTDTSMKTVYMELESLTSGDTAMYFCARDATPITTEFDYWGQGTLITVSSRLHQRP

SEQ ID NO: 895 - protein, 120 aa, Homo sapiens; identical to SEQ ID NO: 893

SEQ ID NO: 896 - protein, 128 aa, Homo sapiens
QVQLVQSGAEVKRPGASVRVACKTSGYTFTDYHIHWVRQAPGQGLEWMGYFNPRTGETDYAQKFQDRITMTGDVSMSTAYLELSGLRSGDTAVYYCARPLALYCSSSKCYTLWALDIWGQGQWSPSLQ

SEQ ID NO: 897 - protein, 120 aa, Homo sapiens
QVQLVQSGAEVKKPGASVKVSCGTSGYTFTNYYIHWVRQAPGHGLEWMAWINPSGGATIYAEAFEGRVTVTTDTSMKTVYMELESLTSGDTAMYFCTRDATPITTEFDYWGQGTLITVSS

SEQ ID NO: 898 - protein, 126 aa, Homo sapiens
QVQLVQSGAEVKKPGASVKVSCGTSGYTFTNYYIHWVRQAPGHGLEWMAWINPSGGATIYAEAFEGRVTVTTDTSMKTVYMELESLTSGDTAMYFCARDATPITTEFDYWGQGTLITVSSRLHQRP

SEQ ID NO: 899 - protein, 136 aa, Homo sapiens
QVQLVQSGAEVKKPGASVKVSCGTSGYTFTNYYIHWVRQAPGHGLEWMAWINPSGGATIYAEAFEGRVTVTTDTSTKTVYMELESLTSGDTAMYFCARDATPITTEFDYWGQGTLITVSSASTKGPSVFPRGHPPP

SEQ ID NO: 900 - protein, 118 aa, Homo sapiens
QVQLVQSGAEVKKPGASVKVSCGTSGYTFTNYYIHWVRQAPWTWAVDGLDQPRWCHNLCRGFGQVTVTTDTSMKTVYMELESLTSGDTAMYFCARDATPITTELNYWGPGNTDHRLLT

SEQ ID NO: 901 - protein, 121 aa, Homo sapiens
QVQLVQSGAEVKKPGASMRVSCQTSGYTFNSYYIHWMRQVPGQGLEWMGWINPNSGYTNYTQKFQGRVTMTRDTSINTAYLELSALRSDETAVYYCARDFSDGWPYSFDFWGQGTLVTVSS

SEQ ID NO: 902 - protein, 138 aa, Homo sapiens
QVQLVQSGAEVKRPGASMRVSCQTSGYTFNSYYIHWMRQVPGQGLEWMGWINPNSGYTNYTQKFQGRVTMTRDTSINTAYLELSALRSDETAVYYCARDFSDGWPYSFDFWGQGTLVTVSSASTRPIGLPLGHPPPTT

SEQ ID NO: 903 - protein, 123 aa, Homo sapiens
QVQLVQSGAEVKKPGASVKVSCGTSGYTFTNYYIHWVRQAPGHGLEWMAWINPSGGATIYAEAFEGRVTVTTDTSMKTVYMDWSSLTSGDTAMYFCARDATPITTEFDYWGQGTLITVSSRLH

SEQ ID NO: 904 - protein, 123 aa, Homo sapiens
QVQLVQSGAEVKKPGASVKVSCGTSGYTFTNYYIHWVRQAPGHGLEWMAWINPSGGATIHAEAFEGRVTVTTDTSMKTVYMELESLTSGDTAMYFCARDATPITTEFDYWGQGTLITVSSRLH

SEQ ID NO: 905 - protein, 133 aa, Homo sapiens
QVQLVQSGAEVKKPGASVKASCGTSGYTFTNYYIHWVRQAPGHGLEWMAWINPSGGATIYAEAFEGRVTVTTDTSMKTVYMELESLTSGDTAMYFCARDATPITTEFDYWGQGTLITVSSRLHQRPIRSFPLG

SEQ ID NO: 906 - protein, 122 aa, Homo sapiens
QVQLVRSGAEVKKPGASVKVSCGTSGYTFTNYYIHWVRQAPGHGLEWMAWINPSGGATIYAEAFEGRVTVTTDTSMKTVYMELESLTSGDTAMYFCARDATPITTEFDYWGQGTLTHRLLTP

SEQ ID NO: 907 - protein, 118 aa, Homo sapiens
QVQLVQSGSEVKKPGASVKVSCGTSGYTFSNHYIHWVRQAPGHGLEWMAWINPSGGATIYSENFEGRVTVTRDTSMKTVYMELNSLTSGDTAVYYCARDATPITTEFDYWGQGHSPSP

SEQ ID NO: 908 - protein, 124 aa, Homo sapiens
QVQLVQSGAEVKKPGASVKVSCGTSGYAFTNYYIHWVRQAPGHGLEWMAWINPSGGATIYAEAFEGRVTVTTDTSMKTVYMELESLTSGDTAMYFCARDATPITTEFDYWGQGTLITVSSRLHQ

SEQ ID NO: 909 - protein, 120 aa, Homo sapiens
QVQLVQSGAEVKKPGASVKVSCGTSGYTFTNYYIHWVRQAPGHGLEWMAWINPSGGATIYAEAFEGRVTVTTGTSMKTVYMELESLTSGDTAMYFCARDATPITTEFDYWGQGTLITVSS

SEQ ID NO: 910 - protein, 124 aa, Homo sapiens
QVQLVQSGAEVKKPGASVKVSCGTSGYTFTNYYIQLGAAGPWTWAVDGLDQPRWCHNLCRGFGQGHRNTDTSMKTVYMELESLTSGDTAMYFCARDATPITTEFDYWGQGTLITVSSRLHRTGP

SEQ ID NO: 911 - protein, 120 aa, Homo sapiens
QVQLVQSGAEVKKPGASVKVSCGTSGYTFTNYYIHWVRRAPGHGLEWMAWINPSGGATIYAEAFEGRVTVTTDTSMKTVYMELESLTSGDTAMYFCARDATPITTEFDYWGQGTLITVSS

SEQ ID NO: 912 - protein, 123 aa, Homo sapiens
QVQLVRSGPAVKKPGTSVKVSCKASRYSFTAFYMHWVRQAPRHGLEWVGWIEPNSGGTSYGQRFQGRVTLTRDASINTFYMELSSLTDDDSAVYYCARDGGGSAFHGPYDLWGQGHWSPSLQP

SEQ ID NO: 913 - protein, 120 aa, Homo sapiens
QVQLVQSGAEVKKPGASVKVSCGTSGYTFTNYYIHWVRQAPGHGLEWMAWINPSGGATIYAEAFESRVTVTTDTSMKTVYMELESLTSGDTAMYFCARDATPITTEFDYWGQGTLITVSS

SEQ ID NO: 914 - protein, 139 aa, Homo sapiens
QVQLVQSGAEVKKPGASVKVSCGTSGYTFTNYYIHWVRQAPGHGFEWMAWINPSGGATIYAEAFEGRVTVTTDTSMKTVYMELESLTSGDTAMYFCARDATPITTEFDYWGQGTLITVSSGSASRPNPFPPRPPLTNFP

SEQ ID NO: 915 - protein, 120 aa, Homo sapiens
QVQLVQSGAEVKKPGASVKVSCGTSGYTFTNYYIHWVRQAPGHGLEWMAWINPSGGATIYAEAFEGRVTVTTDTSMKTVYMELESLTSGGTAMYFCARDATPITTEFDYWGQGTLITVSS

SEQ ID NO: 916 - protein, 126 aa, Homo sapiens
QVQLVQSGAEVKKPGESLKISCKGSGYTFTDYYIHWVRQAPGQRLEWMGWFNPNTGGAHYGLDYQGRVTMTGDTSMTTVYMELTRLASDDTAIYYCAREGLCRTTSCQFDYWGQGTLVTVSSRLHR

SEQ ID NO: 917 - protein, 121 aa, Homo sapiens; identical to SEQ ID NO: 901

SEQ ID NO: 918 - protein, 142 aa, Homo sapiens
QVQLVQSGAEVKKPGASVKASCGTSGYTFTNYYIHWVRQAPGHGLEWMAWINPSGGATIYAEAFEGRVTVTTDTSMKTVYMELESLTSGDTAMYFCARDATPITTEFDYWGQGTLITVSSASTNGPSGPSPVGHPPPKTPPR

SEQ ID NO: 919 - protein, 122 aa, Homo sapiens
QVQLVRSGAEVKKPGASMRVSCQTSGYTFNSYYIHWMRQVPGQGLEWMGWINPNSGYTNYTQKFQGRVTMTRDTSINTAYLELSALRSDEAAVYYCARDFSDGWPYSFDFWGQGTLVTVSSA

SEQ ID NO: 920 - protein, 118 aa, Homo sapiens
QVQLMQSGAEVKKPGASVKVSCGTSGYTFTNYYIHWVRQAPGHGLEWMAWINPSGGATIYAEAFEGRVTVTTDTSMKTVYMELESLTSGDTAMYFCARDATPITTEFDYWGQGTRSPS

SEQ ID NO: 921 - protein, 127 aa, Homo sapiens
QVQLVQSGAEVKKPGASMRVSCQTSGYTFNSYYIHWMRQVPGQGLEWMGWINPNSGYTNYTQKFQGRVTMTRDTSINTAYLELSALRSDETAVYYCARDFSNGWPYSFDFWGQGTLVTVSSRLHQRA

SEQ ID NO: 922 - protein, 139 aa, Homo sapiens
QVQLVPSGAEVKKPGASVKVSCGTSGYTFTNYYIHWVRQAPGHGLEWMAWINPSGGATIYAEAFEGRVTVTTDTSMKTVYMELESLTSGDTAMYFCARDATPITTEFDYWGQGTLITVSSRLHQRAHPVLPPGHPPPTT

SEQ ID NO: 923 - protein, 139 aa, Homo sapiens
QVQLVQFGAEVKKPGSSVKVSCKASGYSFTDYYIHWVRQAPGKRLEWVGWFNPKTGGAHYGLDYQGRVTMTGGTSITTVYMELTRLASDDTAMYYCAREEFENYQLPIDFWGQGTLVTVFSASTNGHPVFPLGHPPPTT

SEQ ID NO: 924 - protein, 122 aa, Homo sapiens
QVQLVQSGSEVKKPGASVKVSCGTSGYTFSNHYIHWVRQAPGHGLEWMAWINPSGGATIYSENFEGRVTVTRDTSMKTVYMELNSLTSGDTAVYYCARDATPITTEFDYWGQGTLITVSSRL

SEQ ID NO: 925 - protein, 133 aa, Homo sapiens
QVQLVQSGAEVKKPGASVKVSCGTSGYTFTNYYIHWVRQAPGHGLEWMAWINPSGGATIYAEAFEGRVTVTTDTSMKTLHGVGEPDIWRHGHVFLRQRCDSGLRNLTTWGQGTLITVSSRLHQRAHSGPSPVG

SEQ ID NO: 926 - protein, 135 aa, Homo sapiens
QVQLVQSGAEVKKPGASVKVSCGTSGYTFTNYYIHWVRQAPGHGLEWMAWINPGGGATIYAEAFEGRVTVTTDTSMKTVYMELESLTSGDTAMYFCARDATPITTEFDYWGQGTLITVSSRLHQGPIRSFPLGHP

SEQ ID NO: 927 - protein, 120 aa, Homo sapiens
QVQLVQSGAEVKKPGVSVKVSCGTSGYTFTNYYIHWVRQAPGHGLEWMAWINPSGGATIYAEAFEGRVTVTTDTSMKTVYMELESLTSGDTAMYFCARDATPITTEFDYWGQGTLITVSS

SEQ ID NO: 928 - protein, 126 aa, Homo sapiens
QVQLVQSGAEVKKPGASVKVSCGTSGYTFTNYYIHWVRQAPGHGLEWMAWINPSGGATIYAEAFEGRVTVTTDTSMKTVYMELENLTSGDTAMYFCARDATPITTEFDYWGQGTLITVSSRLHQRA

SEQ ID NO: 929 - protein, 116 aa, Homo sapiens
QVQLVQSGAEVKKPGASMRVSCQTSGYTFNSYYIHWMRQVPGQGLEWMGWINPNSGYTNYTQKFQGRVTMTRDTSINTAYLELSALRSDETAVYYCARVLRTVGLTPSTSWGQGTR

SEQ ID NO: 930 - protein, 146 aa, Homo sapiens
QVQLVQSGAEVKKPGASVKVSCKASRYTVNGRFIHWVRQAPGQGLEWLGWIKPNSESTNYAWKFRGRVSMTGDTSINTVYMELRSLRSDDTAVYYCASCDRRGGICIDVEGGGYYAMDVWGQGTSVTVSSASTKGPSVFPLAPCSR

SEQ ID NO: 931 - protein, 127 aa, Homo sapiens
QVQLVQSGAEVKKPGASMRVSCQTSGYTFNSYYIHWMRQVPGQGLEWMGWINPNSGYTNYTQKFQGRVTMTRDTSINTAYLELSALRSDETAVYYCARDFSDGWPYSFDFWGQGTLVTVSSRLHQRA

SEQ ID NO: 932 - protein, 122 aa, Homo sapiens
QVQLVQSGAEVKKPGSSVKVSCGTSGYTFTNYYIHWVRQAPGHGLEWMAWINPSGGATIYAEAFEGRVTVTTDTSMKTVYMELESLTSGDTAMYFCARDATPITTEFDYWGQGTLITVSSRL

SEQ ID NO: 933 - protein, 119 aa, Homo sapiens
QVQLVQSGPEVKKPGASLKVSCKASGYTFIDYYIHWVRQVPGQRLEWMGWINPKTTGALYADNFQGRVTMTRDTSISTAYMELRNLRSEDTAVYYCARWGVELLVWTSWGQGDPRSPSP

SEQ ID NO: 934 - protein, 162 aa, Homo sapiens
QVQLVQSGAEVKKPGASMRVSCQTSGYTFNSYYIHWMRQVPGQGLEWMGWINPNSGYTNYTQKFQGRVTMTRDTSINTAYLELSALRSDETAVYYCARDFSDGWPYSFDFWGQGTLVTVSSASTKAHRSSPWHPPPTTHLWGTAALGCLVKDYFPNRRCRGT

SEQ ID NO: 935 - protein, 120 aa, Homo sapiens
QVQLVQSGAEVKKPGASVKVSCGTSGYTFTNYYIHWVRQAPGHGLEWMAWINPSGSATIYAEAFEGRVTVTTDTSMKTVYMELESLTSGDTAMYFCARDATPITTEFDYWGQGTLITVSS

SEQ ID NO: 936 - protein, 122 aa, Homo sapiens; identical to SEQ ID NO: 924

SEQ ID NO: 937 - protein, 122 aa, Homo sapiens
QVQLVQSGAEVKKPGASVKVSCGTSGYTFTNYYIHWVRQAPGHGLEWMAWINPSGGATIYAEAFEGRVTVTTDTSMKTVYMELESLTSGDTATYFCARDATPITTEFDYWGQGTLITVSSRL

SEQ ID NO: 938 - protein, 128 aa, Homo sapiens
QVQLVRSGAEVKKPGASVKVSCGTSGYTFTNYYIHWVRQAPGHGLEWMAWINPSGGATIYAEAFEGRVTVTTDTSMKTVYMELESLTSGDTAMYFCARDATPITTEFDYWGQGTLITVSSASTKAHRS

SEQ ID NO: 939 - protein, 123 aa, Homo sapiens
QVQLVQSGAEVKKPGASVKVSCGTSGYTFINYYIHWVRQAPGHGLEWMAWINPSGGATIYAEAFEGRVTVTTDTSMKTVYMELESLTSGDTAMYFCARDATPITTEFDYWGQGTLITVSSAST

SEQ ID NO: 940 - protein, 122 aa, Homo sapiens
QVQLVQSGAEVKKPGASVKVSCGTSGYTFTNYYIHWVRQAPGHGLEWMAWVNPSGGATIYAEAFEGRVTVTTDTSMKTVYMELESLTSGDTAMYFCARDATPITTELTTWGQGTLITVSSRL

SEQ ID NO: 941 - protein, 120 aa, Homo sapiens; identical to SEQ ID NO: 893

SEQ ID NO: 942 - protein, 120 aa, Homo sapiens; identical to SEQ ID NO: 893

SEQ ID NO: 943 - protein, 123 aa, Homo sapiens
QVQLVQSGAEVKKPGASVKVSCGTSGYTFTNYYIHWVRQAPGHGLEWMAWINPSGGATIYAEAFEGRVTVTTDTSMKTVYMELESLTSGDTAMYFCARDATPITTEFDYWGQGTLITVSSRLH

SEQ ID NO: 944 - protein, 120 aa, Homo sapiens; identical to SEQ ID NO: 893

SEQ ID NO: 945 - protein, 120 aa, Homo sapiens
QVQLVQSGAEVKKPGASVKVSCGTSGYTFTNYYIHWVRQAPGHGLEWMAWINPSGGATIYAEAFEGRVTVTTDTSMKTVYMELESLTSGDTAMYFCAEMRLRLRNLTTWGQGTLITVSSR

SEQ ID NO: 946 - protein, 123 aa, Homo sapiens; identical to SEQ ID NO: 943

SEQ ID NO: 947 - protein, 121 aa, Homo sapiens
QVQLVQSGAEVKKPGASVKVSCGTSGYTFTNYYIHWVRQAPGHGLEWMAWINPSGGATIYAEAFEGRVTVTTDTSMKTVYMELESLTSGDTAMYFCARDATPITTEFDYWGQGTLTPPSPH

SEQ ID NO: 948 - protein, 134 aa, Homo sapiens
QVQLVQSGAEVKKPGASVKVSCGTSGYTFTNYYIHWVRQAPGHGLEWMAWINPSGGATIYAEAFEGRVTVTTDTSMKTVYMELESLTSGDTAMYFCARDATPITTEFDYWGQGTLITVSSRPHQRAHSGPSPSA

SEQ ID NO: 949 - protein, 122 aa, Homo sapiens
QVQLVQSGPAVKKPGTSVKVSCKASRYSFTAFYMHWVRQAPRHGLEWVGWIEPNSGGTSYGQRFQGRVTLTRDASINTFYMELSSLTDDDSAVYYCARDGGGSAFHGPYDLWGQGTLVTVSS

SEQ ID NO: 950 - protein, 120 aa, Homo sapiens; identical to SEQ ID NO: 893

SEQ ID NO: 951 - protein, 142 aa, Homo sapiens
QVQLVQSGAEVKKPGASVKVSCGTSGYTFTNYYIHWVRQAPGHGLEWMAWINPSGGATIYAEAFEGRVTVTTDTSMKTVYMELESLTSGDTAMYFCARDATPITTEFDYWGQGTLITVSSASTNGPLGPSPSATLLPTTPPR

SEQ ID NO: 952 - protein, 123 aa, Homo sapiens
QVQLVQSGAEVKKPGASVKVSCGTSGYTFTNYYIHWVRQAPGHGLEWMAWINPSGGATIYAEAFEGRVTVTTDTSMKTVYMELESLTSGDTAMYFCARDATPITTEFDYWGQGTLITVSSAST

SEQ ID NO: 953 - protein, 148 aa, Homo sapiens
QVQLVQSGAEVKKPGASVKVSCGTSGYTFTNYYIHWVRQAPGHGLEWMAWINPSGGATIYAEAFEGRVTVTTDTSMKTVYMELESLTSGDTAMYFCARDATPITTEFDYWGQGTLITVSSASTKAHRSSPWHPPPRRTSGAQQPWLPG

SEQ ID NO: 954 - protein, 138 aa, Homo sapiens
QVQLVQSGAEVKKPGASMRVSCQTSGYTFNSYYIHWMRQVPGQGLEWMGWINPNSGYTNYTQKFQGRVTMTRDTSINTAYLELSALRSDETAVYYCARDFSDGWPYSFDFWGQGTLVTVSSASTKAHRSSPWPPSSND

SEQ ID NO: 955 - protein, 123 aa, Homo sapiens
QVQLVQSGAEVKKPGASVKVSCGTSGYTFTNYYIHWVRQAPGHGLEWMAWINPSGGATIYAEAFEGRVTVTTDTSMKTVYMELESLTSGDTAMYFCARDATPITTDLTTWGQGTLITVSSRLH

SEQ ID NO: 956 - protein, 119 aa, Homo sapiens
QVQLVQSGAEVKKPGASMRVSCQTSGYTFNSYYIHWMRQVPGQGLEWMGWINPNSGYTNYTQKFQGRVTMTRDTSINTAYLELSALRSDETAVYYCARDFSDGWPYSFDFWGQGLSPSP

SEQ ID NO: 957 - protein, 123 aa, Homo sapiens; identical to SEQ ID NO: 943

SEQ ID NO: 958 - protein, 126 aa, Homo sapiens; identical to SEQ ID NO: 898

SEQ ID NO: 959 - protein, 120 aa, Homo sapiens; identical to SEQ ID NO: 893

SEQ ID NO: 960 - protein, 122 aa, Homo sapiens; identical to SEQ ID NO: 884

SEQ ID NO: 961 - protein, 124 aa, Homo sapiens
QVQLVQSGAEVKKPGASMRVSCQTSGYTFNSYYIHWMRQVPGQGLEWMGWINPNSGYTNYTQKFQGRVTMTRDTSINTAYLELSALRSDETAVYYCARDFSDGWPYSFDFWGQGTLVTVSSAST

SEQ ID NO: 962 - protein, 123 aa, Homo sapiens; identical to SEQ ID NO: 943

SEQ ID NO: 963 - protein, 120 aa, Homo sapiens; identical to SEQ ID NO: 893

SEQ ID NO: 964 - protein, 120 aa, Homo sapiens; identical to SEQ ID NO: 893

SEQ ID NO: 965 - protein, 126 aa, Homo sapiens
QVQLVQSGAEVKKPGASVKVSCGTSGYTFTNYYIHWVRQAPGHGLEWMAWINPSGGATIYAEAFEGRVTVTTDTSMKTVYMELESLTSGDTAMYFCARDATPITTEFDYWGQGTLITVSSRLHQRA

SEQ ID NO: 966 - protein, 126 aa, Homo sapiens; identical to SEQ ID NO: 898

SEQ ID NO: 967 - protein, 120 aa, Homo sapiens
QVQLVQSGVEVKKPGASMKVSCKASGYSFTDYYIHWVRQAPGKRLEWVGWFNPKTGGAHYGLDYQGRVTMTGDTSITTVYMELTRLASDDTAMYYCAREGVCRTTSCQFDFWGQGWSPSS

SEQ ID NO: 968 - protein, 124 aa, Homo sapiens; identical to SEQ ID NO: 961

SEQ ID NO: 969 - protein, 124 aa, Homo sapiens
QVQLVQSGAEMKKPGASVRVSCRASGYSLSDYGMHWVRQAPGQGLEWMGWIRQNSGGATYAQKFQGRVIMSRDTSITTDFIELSSLTLDDTAVYYCARAQRPVADALELDYWGQGTLVTVSSAS

SEQ ID NO: 970 - protein, 120 aa, Homo sapiens; identical to SEQ ID NO: 893

SEQ ID NO: 971 - protein, 121 aa, Homo sapiens
QVQLVQSGAEVKKPGASVKVSCGTSGYTFTNYYIHWVRQAPGHGLEWMAWINPSGGATIYAEAFEGRVTVTTDTSMKTVYMELESLTSGDTAMYFCARDATPITTEFDYWGQGTLITVSSR

SEQ ID NO: 972 - protein, 120 aa, Homo sapiens
QVQLVQSGAEVKKPGASVKVSCGTSGYTFTNDYIHWVRQAPGHGLEWMAWINPSGGATIYAEAFEGRVTVTTDTSMKTVYMELESLTSGDTAMYFCARDATPITTEFDYWGQGTLITVSS

SEQ ID NO: 973 - protein, 124 aa, Homo sapiens; identical to SEQ ID NO: 961

SEQ ID NO: 974 - protein, 122 aa, Homo sapiens
QVQLVQSGAEVKKPGASVKVSCGTSGYTFTNYYIHWVRQAPGHGLEWMAWINPSGGATIYAEAFEGRVTVTTDTSMNTVYMELESLTSGDTAMYYCARDATPITYGIDYWGQGTLITVSSRL

SEQ ID NO: 975 - protein, 141 aa, Homo sapiens
QVQLVQSGAEVKKPGASVKVSCGTSGYTFTNYYIHWVRQAPGHGLEWMAWINPSGGATIYAEAFEGRVTVTTDTSMKTVYMELESLTSGDTAMYFCARDATPITTEFDYWGQGTLITVSSRLHQRPTRSFPLGHPPPTTPP

SEQ ID NO: 976 - protein, 120 aa, Homo sapiens
QVQLVQSGSEVKKPGASVKVSCGTSGYTFTNYYIHWVRQAPGHGLEWMAWINPSGGATIYAEAFEGRVTVTTDTSMKTVYMELESLTSGDTAMYFCARDATPITTEFDYWGQGTLITVSS

SEQ ID NO: 977 - protein, 123 aa, Homo sapiens
QVQLVQSGGEVKTPGASVKVSCRTSGYTFTAYYIHWVRQAPGHGLEWVGWINPSGGATIYAQKFEGRVTLTSDTSISTAYLELSNLRPDDTATYYCVRDATPVTTEFDFWGQGALVTVSSRLH

SEQ ID NO: 978 - protein, 122 aa, Homo sapiens; identical to SEQ ID NO: 884

SEQ ID NO: 979 - protein, 147 aa, Homo sapiens
QVQLVQSGAEVKRPGASVRVACKTSGYTFTDYHIHWVRQAPGQGLEWMGYFNPRTGETDYAQRFQDRITMTGDVSMSTAYMELSGLRSGDTAVYYCARPLALYCSSSKCYTLWALDIWGQGTMVTVSASSTKGPSVFPLAPCSRTHL

SEQ ID NO: 980 - protein, 120 aa, Homo sapiens; identical to SEQ ID NO: 893

SEQ ID NO: 981 - protein, 140 aa, Homo sapiens
QVQLVQSGAEVKKPGASVKVSCGTSGYTFTNYYIHWVRQAPGHGLEWMAWINPSGGATIYAEAFEGRVTVTTDTSMKTVYMELESLTSGDTAMYFCARDATPITTELTTWGQGTLITVSSRLHRTAHSGPSPSATLLPTT

SEQ ID NO: 982 - protein, 122 aa, Homo sapiens; identical to SEQ ID NO: 884

SEQ ID NO: 983 - protein, 115 aa, Homo sapiens
QVQLVQSGAELRKSGASAKVSCTATGYTSTAYYVHWVRQAPGQGLGWMGCINPQSDDTKYAQKFQGRVTMTRDTSTNTAYMELSGLTFDDTAMYYCLTAIDGIVYWGQGPLVHRF

SEQ ID NO: 984 - protein, 134 aa, Homo sapiens
QVQLVQSGAEVKKPGASVKVSCGTSGYTFTNYYIHWVRQAPGHGLEWMAWINPSGGATIYAEAFEGRVTVTTDTSMKTVYMELESLTSGDTAMYFCARDATPITTEFDYWGQGTLITVSSRLHRTAHSGPSPVG

SEQ ID NO: 985 - protein, 120 aa, Homo sapiens; identical to SEQ ID NO: 893

SEQ ID NO: 986 - protein, 121 aa, Homo sapiens; identical to SEQ ID NO: 901

SEQ ID NO: 987 - protein, 120 aa, Homo sapiens; identical to SEQ ID NO: 893

SEQ ID NO: 988 - protein, 121 aa, Homo sapiens; identical to SEQ ID NO: 901

SEQ ID NO: 989 - protein, 134 aa, Homo sapiens
QVQLVQSGAEVKKPGASVKVSCGTSGYTFTNYYIHWVRQAPGHGLEWMAWINPSGGATIYAEAFEGRVTVTTDTSMKTVYMELESLTSGDTAMYFCARDATPITTEFDYWGQGTLITVSSRLHQRPIGPSPSAT

SEQ ID NO: 990 - protein, 120 aa, Homo sapiens; identical to SEQ ID NO: 893

SEQ ID NO: 991 - protein, 121 aa, Homo sapiens
QVQLVQSGAEVKKPGASVKVSCGTSGYTFTNYYIHWVRQAPGHGLEWMAWINPSGGATIYAEAFEGRVTVTTDTSMKTVYMELESLTSGDTAMYFCARDATPITTELTTWGPGNTDHRLLT

SEQ ID NO: 992 - protein, 121 aa, Homo sapiens
QVQLVQSGAEVKKPGASMRVSCQTSGYTFNSYYIHWMRQVPGQGLEWMGWINPNSGYTNYTQKFQGRVTMTRDTSINTAYLELSALRSDETAVYYCARDFSDGWPYSFDFWGPGNSSHRLL

SEQ ID NO: 993 - protein, 134 aa, Homo sapiens
QVQLVQSGAEVKKPGASVKVSCGTSGYTFTNYYIHWVRQAPGHGLEWMAWINPSGGATIYAEAFEGRVTVTTDTSMKTVYMELESLTSGDTAMYFCARDATPITTEFDYWGQGTLITVSSRLHQRPTPVLPPSA

SEQ ID NO: 994 - protein, 120 aa, Homo sapiens; identical to SEQ ID NO: 893

SEQ ID NO: 995 - protein, 122 aa, Homo sapiens
QVQLVQSGAEVKKPGASVKVPCGTSGYTFTNYYIHWVRQAPGHGLEWMAWINPSGGATIYAEAFEGRVTVTTDTSMKTVYMELESLTSGDTAMYFCARDATPITTEFDYWGQGTLITVSSRL

SEQ ID NO: 996 - protein, 122 aa, Homo sapiens
QVQLVQSGAEVKKPGASVKVSCGTSGYTFTNYYIHWVRQAPGHGLEWMAWINPSGGATIYAEAFEGRVTVTTDTSMKTVYMELESLTSGDTAMYFCARDATPITTEFDYWGQGTLITVSSRP

SEQ ID NO: 997 - protein, 121 aa, Homo sapiens
QVQLVQSGAEVKKPGASVKVSCGTSGYTFTNYYIHWVRQAPGHGLEWMAWINPSGGATIYAEAFEGRVTVTTDTSMKNSLHGVGEPDIWRHGHVFLTPEMRLRLRNLTTWGQGTLITVSSR

SEQ ID NO: 998 - protein, 121 aa, Homo sapiens; identical to SEQ ID NO: 901

SEQ ID NO: 999 - protein, 121 aa, Homo sapiens; identical to SEQ ID NO: 971

SEQ ID NO: 1000 - protein, 124 aa, Homo sapiens
QVQLVQSGAEVKKPGASVKVSCGTSGYTFTNYYIHWVRQAPGHGLEWMAWINPSGGATIYAEAFEGRVTVTTDTSMKTVYMELESLTSGDTAMYFCARDATPITTEFDYWGQGTLITVSSRLHQ

SEQ ID NO: 1001 - protein, 139 aa, Homo sapiens
QVQLVQSGAEVKKPGASVKVSCGTSGYTFTNYYIHWVRQAPGHGLEWMAWINPSGGATIYAEAFEGRVTVTTDTSMKTVYMELESLTSGDTAMYFCARDATPITTEFDYWGQGTLITVSSRLHQRPIGPSPSATLLPTT

SEQ ID NO: 1002 - protein, 120 aa, Homo sapiens; identical to SEQ ID NO: 893

SEQ ID NO: 1003 - protein, 123 aa, Homo sapiens; identical to SEQ ID NO: 943

SEQ ID NO: 1004 - protein, 120 aa, Homo sapiens; identical to SEQ ID NO: 893

SEQ ID NO: 1005 - protein, 121 aa, Homo sapiens; identical to SEQ ID NO: 971

SEQ ID NO: 1006 - protein, 123 aa, Homo sapiens; identical to SEQ ID NO: 943

SEQ ID NO: 1007 - protein, 120 aa, Homo sapiens; identical to SEQ ID NO: 893

SEQ ID NO: 1008 - protein, 118 aa, Homo sapiens
QVQLVQSGAEVKKPGASVKVSCGTSGYTFTNYYIHWVRQAPGHGLEWMAWINPSGGATIYAEAFEGRVTVTTDTSMKTVYMELESLTSGDTAMYFCARDATPITTEFDYWGQGTLITV

SEQ ID NO: 1009 - protein, 131 aa, Homo sapiens
QVQLVQSGAEVKKPGASVKVSCGTSGYTFTNYYIHWVRQAPGHGLEWMAWINPSGGATIYAEAFEGRVTVTTDTSMKTVYMELESLTSGDTAMYFCARDATPITTEFDYWGQGTLITVSSASTEGPSGPSP

SEQ ID NO: 1010 - protein, 137 aa, Homo sapiens
QVQLVQSGAEVKKPGASVKVSCGTSGYTFTNYYIHWVRQAPGHGLEWMAWINPSGGATIYAEAFEGRVTVTTDTSMKTVYMELESLTSGDTAMYFCARDATPITTEFDYWGQGTLITVSSASTTAHRSSPSAPSSND

SEQ ID NO: 1011 - protein, 121 aa, Homo sapiens; identical to SEQ ID NO: 901

SEQ ID NO: 1012 - protein, 120 aa, Homo sapiens; identical to SEQ ID NO: 893

SEQ ID NO: 1013 - protein, 148 aa, Homo sapiens
QVQLVQSGAEVKKPGASVKVSCGTSGYTFTNYYIHWVRQAPGHGLEWMAWINPSGGATIYAEAFEGRVTVTTDTSMKTVYMELESLTSGDTAMYFCARDATPITTEFDYWGQGTLITVSSASTNGPSGPSPWPPSSQDATSSGHDARP

SEQ ID NO: 1014 - protein, 121 aa, Homo sapiens
QVQLVQSGAEVKKPGASMRVSCQTSGYTFNSYYIHWMRQVPGQGLEWMGWISPNSGYTNYTQKFQGRVTMTRDTSINTAYLELSALRSDETAVYYCARDFSDGWPYSFDFWGQGTLVTVSS

SEQ ID NO: 1015 - protein, 120 aa, Homo sapiens; identical to SEQ ID NO: 893

SEQ ID NO: 1016 - protein, 120 aa, Homo sapiens; identical to SEQ ID NO: 893

SEQ ID NO: 1017 - protein, 124 aa, Homo sapiens; identical to SEQ ID NO: 961

SEQ ID NO: 1018 - protein, 126 aa, Homo sapiens; identical to SEQ ID NO: 965

SEQ ID NO: 1019 - protein, 151 aa, Homo sapiens
QVQLVQSGAEVKKPGASVKVSCGTSGYTFTNYYIHWVRQAPGHGLEWMAWINPSGGATIYAEAFEGRVTVTTDTSMKTVYMELESLTSGDTAMYFCARDATPITTEFDYWGQGTLITVSSRLHQRAHVRSFPRRPPSSNDATSSGPRRTPV

SEQ ID NO: 1020 - protein, 122 aa, Homo sapiens
QVQLVQSGAEVKKPGASVKVSCGTSGYTFTNYYIHWVRQAPGHGLEWMAWINPSGGATIYAEAFEGRVTVTTDTSMKTVYMELESLTSGDTAMYFCAEMRLRLRNLTTWGQGTLITVSSRLH

SEQ ID NO: 1021 - protein, 141 aa, Homo sapiens
QVQLVQSGAEVKKPGASMRVSCQTSGYTFNSYYIHWMRQVPGQGLEWMGWINPNSGYTNYTQKFQGRVTMTRDTSINTAYLELSALRSDETAVYYCARDFSDGWPYSFDFWGQGTLVTVSSASTKAHRSSPGTSSKTHLWG

SEQ ID NO: 1022 - protein, 124 aa, Homo sapiens
QVQLVQSGAEVKKPGASMRVSCQTSGYTFNSYYIHWMRQVPGQGLEWMGWINPNSGYTNYTQKFQGRVTMTRDTSINTAYLELSALRSDETAVYYCARDFSDGWPYSFDFWGPGNSSHRLLSLH

SEQ ID NO: 1023 - protein, 140 aa, Homo sapiens
QVQLVQSGAEVKKPGASMRVSCQTSGYTFNSYYIHWMRQVPGQGLEWMGWINPNSGYTNYTQKFQGRVTMTRDTSINTAYLELSALRSDETAVYYCARDFSDGWPYSFDFWGQGTLVTVSSRLHQRPIRSSPSATLLQRR

SEQ ID NO: 1024 - protein, 143 aa, Homo sapiens
QVQLVQSGAEVKKPGASVKVSCGTSGYTFTNYYIHWVRQAPGHGLEWMAWINPSGGATIYAEAFEGRVTVTTDTSMKTVYMELESLTSGDTAMYFCARDATPITTEFDYWGQGTLITVSSRLHQRAHPVLPPRPPSLQRRHLV

SEQ ID NO: 1025 - protein, 135 aa, Homo sapiens
QVQLVQSGAEVKKPGASVKVSCGTSGYTFTNYYIHWVRQAPGHGLEWMAWINPSGGATIYAEAFEGRVTVTTDTSMKTVYMELESLTSGDTAMYFCARDATPITTEFDYWGQGTLITVSSGSALPPLTLFPLVLL

SEQ ID NO: 1026 - protein, 120 aa, Homo sapiens; identical to SEQ ID NO: 893

SEQ ID NO: 1027 - protein, 122 aa, Homo sapiens
QVQLVQSGAEVKKPGASMRVSCQTSGYTFNSYYIHWMRQVPGQGLEWMGWINPNSGYTNYTQKFQGRVTMTRDTSINTAYLELSALRSDETAVYYCARDFSDGWPYSFDFWGQGTLVTVSSR

SEQ ID NO: 1028 - protein, 121 aa, Homo sapiens; identical to SEQ ID NO: 901

SEQ ID NO: 1029 - protein, 121 aa, Homo sapiens; identical to SEQ ID NO: 971

SEQ ID NO: 1030 - protein, 116 aa, Homo sapiens
QVQLVQSGAEVKKPGASVKVSCGTSGYTFTNYYIHWVRQAPGHGLEWMAWINPSGGATIYAEAFEGRVTVTTDTSMKTVYMELESLTSGDTAMYFCARDATPITTEFDYWGQGTLI

SEQ ID NO: 1031 - protein, 123 aa, Homo sapiens; identical to SEQ ID NO: 943

SEQ ID NO: 1032 - protein, 120 aa, Homo sapiens; identical to SEQ ID NO: 893

SEQ ID NO: 1033 - protein, 119 aa, Homo sapiens
QVQLVQSGAEVKKPGASMRVSCQTSGYTFNSYYIHWMRQVPGQGLEWMGWINPNSGYTNYTQKFQGRVTMTRDTSINTAYLELSALRSDETAVYYCARDFSDGWPYSFDFWGQGTLVTV

SEQ ID NO: 1034 - protein, 123 aa, Homo sapiens; identical to SEQ ID NO: 943

SEQ ID NO: 1035 - protein, 120 aa, Homo sapiens; identical to SEQ ID NO: 893

SEQ ID NO: 1036 - protein, 122 aa, Homo sapiens; identical to SEQ ID NO: 884

SEQ ID NO: 1037 - protein, 120 aa, Homo sapiens; identical to SEQ ID NO: 893

SEQ ID NO: 1038 - protein, 123 aa, Homo sapiens; identical to SEQ ID NO: 943

SEQ ID NO: 1039 - protein, 120 aa, Homo sapiens; identical to SEQ ID NO: 893

SEQ ID NO: 1040 - protein, 126 aa, Homo sapiens
QVQLVQSGAEVKKPGASVKVSCGTSGYTFTNYYIHWVRQAPGHGLEWMAWINPSGGATIYAEAFEGRVTVTTDTSMKTVYMELESLTSGDTAMYFCARDATPITTEFDYWGQGTLITVSSASTNGP

SEQ ID NO: 1041 - protein, 120 aa, Homo sapiens; identical to SEQ ID NO: 945

SEQ ID NO: 1042 - protein, 134 aa, Homo sapiens
QVQLVQSGAEVKKPGASVKVSCGTSGYTFTNYYIHWVRQAPGHGLEWMAWINPSGGATIYAEAFEGRVTVTTDTSMKTVYMELESLTSGDTAMYFCARDATPITTEFDYWGQGTLITVSSRLHQRAHSGPSPVG

SEQ ID NO: 1043 - protein, 124 aa, Homo sapiens
QVQLVQSGAEVKKPGASMRVSCQTSGYTFNSYYIHWMRQVPGQGLEWMGWINPNSGYTNYTQKFQGRVTMTRDTSINTAYLELSALRSDETAVYYCARDFSDGWPYSFDFWGQGTRSHRLLTPP

SEQ ID NO: 1044 - protein, 120 aa, Homo sapiens; identical to SEQ ID NO: 893

SEQ ID NO: 1045 - protein, 120 aa, Homo sapiens; identical to SEQ ID NO: 893

SEQ ID NO: 1046 - protein, 126 aa, Homo sapiens
QVQLVQSGAEVKKPGASMRVSCQTSGYTFNSYYIHWMRQVPGQGLEWMGWINPNSGYTNYTQKFQGRVTMTRDTSINTAYLELSALRSDETAVYYCARDFSDGWPYSFDFWGQGTLVTVSSASTRP

SEQ ID NO: 1047 - protein, 123 aa, Homo sapiens; identical to SEQ ID NO: 943

SEQ ID NO: 1048 - protein, 121 aa, Homo sapiens; identical to SEQ ID NO: 901

SEQ ID NO: 1049 - protein, 118 aa, Homo sapiens; identical to SEQ ID NO: 1008

SEQ ID NO: 1050 - protein, 120 aa, Homo sapiens; identical to SEQ ID NO: 893

SEQ ID NO: 1051 - protein, 139 aa, Homo sapiens
QVQLVQSGAEVKKPGASVKVSCGTSGYTFTNYYIHWVRQAPGHGLEWMAWINPSGGATIYAEAFEGRVTVTTDTSMKTVYMELESLTSGDTAMYFCARDATPITTEFDYWGQGTLITVSSASTNGPLGPSPSATLLQRR

SEQ ID NO: 1052 - protein, 137 aa, Homo sapiens
QVQLVQSGAEVKKPGASVKVSCGTSGYTFTNYYIHWVRQAPGHGLEWMAWINPSGGATIYAEAFEGRVTVTTDTSMKTVYMELESLTSGDTAMYFCARDATPITTEFDYWGQGTLITVSSASTNGPIRSFPLAALPP

SEQ ID NO: 1053 - protein, 123 aa, Homo sapiens; identical to SEQ ID NO: 952

SEQ ID NO: 1054 - protein, 126 aa, Homo sapiens; identical to SEQ ID NO: 965

SEQ ID NO: 1055 - protein, 121 aa, Homo sapiens; identical to SEQ ID NO: 971

SEQ ID NO: 1056 - protein, 120 aa, Homo sapiens; identical to SEQ ID NO: 893

SEQ ID NO: 1057 - protein, 120 aa, Homo sapiens; identical to SEQ ID NO: 893

SEQ ID NO: 1058 - protein, 135 aa, Homo sapiens
QVQLVQSGAEVKKPGASVKVSCGTSGYTFTNYYIHWVRQAPGHGLEWMAWINPSGGATIYAEAFEGRVTVTTDTSMKTVYMELESLTSGDTAMYFCARDATPITTEFDYWGQGTLITVSSRLHRRPIGPSPSATL

SEQ ID NO: 1059 - protein, 121 aa, Homo sapiens
QVQLVQSGAEVKKPGASVKVSCGTSGYTFTNYYIHWVRQAPGHGLEWMAWINPSGGATIYAEAFEGRVTVTTDTSMKTVYMELESLTSGDTAMYFCARDATPITTEFDYWGQGTLITVSSA

SEQ ID NO: 1060 - protein, 120 aa, Homo sapiens; identical to SEQ ID NO: 893

SEQ ID NO: 1061 - protein, 120 aa, Homo sapiens; identical to SEQ ID NO: 893

SEQ ID NO: 1062 - protein, 123 aa, Homo sapiens; identical to SEQ ID NO: 943

SEQ ID NO: 1063 - protein, 134 aa, Homo sapiens
QVQLVQSGAEVKKPGASVKVSCGTSGYTFTNYYIHWVRQAPGHGLEWMAWINPSGGATIYAEAFEGRVTVTTDTSMKTVYMELESLTSGDTAMYFCARDATPITTEFDYWGQGTLITVSSRLHRTAQSGPSPVG

SEQ ID NO: 1064 - protein, 122 aa, Homo sapiens; identical to SEQ ID NO: 884

SEQ ID NO: 1065 - protein, 132 aa, Homo sapiens
QVQLVQSGAEVKKPGASVKVSCGTSGYTFTNYYIHWVRQAPGHGLEWMAWINPSGGATIYAEAFEGRVTVTTDTSMKTVYMELESLTSGDTAMYFCARDATPITTEFDYWGQGTLITVSSGMHSRPPFSPSS

SEQ ID NO: 1066 - protein, 124 aa, Homo sapiens; identical to SEQ ID NO: 1000

SEQ ID NO: 1067 - protein, 122 aa, Homo sapiens
QVQLVQSGAEVKKPGASVKVSCGTSGYTFTNYYIHWVRQAPGHGLEWMAWINPSGGATIYAEAFEGRVTVTTDTSMKTVYMELESLTSGDTAMYFCARDATPITTELTTWGPGNTDHRLLTP

SEQ ID NO: 1068 - protein, 115 aa, Homo sapiens
QVQLVQSGAEVKKPGASVKVSCGTSGYTFTNYYIHWVRQAPGHGLEWMAWINPSGGATIYAEAFEGRVTVTTDTSMKTVYMELESLTSGDTAMYFCARDATPITTEFDYWGQGTL

SEQ ID NO: 1069 - protein, 122 aa, Homo sapiens; identical to SEQ ID NO: 884

SEQ ID NO: 1070 - protein, 127 aa, Homo sapiens
QVQLVQSGAEVKKPGASMRVSCQTSGYTFNSYYIHWMRQVPGQGLEWMGWINPNSGYTNYTQKFQGRVTMTRDTSINTAYLELSALRSDETAVYYCARDFSDGWPYSFDFWGQGTLVTVSSASTNGP

SEQ ID NO: 1071 - protein, 120 aa, Homo sapiens; identical to SEQ ID NO: 893

SEQ ID NO: 1072 - protein, 121 aa, Homo sapiens
QVQLVQSGAEVKKPGASVKVSCGTSGYTFTNYYIHWVRQAPGHGLEWMAWINPSGGATIYAEAFEGRVTVTTDTSMKTVYMELESLTSGDTAMYFCARDATPITYGIDYWGQGTLITVSSR

SEQ ID NO: 1073 - protein, 126 aa, Homo sapiens; identical to SEQ ID NO: 965

SEQ ID NO: 1074 - protein, 116 aa, Homo sapiens; identical to SEQ ID NO: 1030

SEQ ID NO: 1075 - protein, 122 aa, Homo sapiens; identical to SEQ ID NO: 884

SEQ ID NO: 1076 - protein, 120 aa, Homo sapiens
QVQLVQSGAEVKKPGASVKVSCGTSGYTFTNYYIHWVRQAPGHGLEWMAWINPSGGATIYAEAFEGRVTVTTDTSMKNSLHGVGEPDICDTAMYFCARDATPITTEFDYWGQGTLITVSS

SEQ ID NO: 1077 - protein, 115 aa, Homo sapiens; identical to SEQ ID NO: 1068

SEQ ID NO: 1078 - protein, 135 aa, Homo sapiens
QVQLVQSGAEVKKPGASVKVSCGTSGYTFTNYYIHWVRQAPGHGLEWMAWINPSGGATIYAEAFEGRVTVTTDTSMKTVYMELESLTSGDTAMYFCARDATPITTEFDYWGQGTLITVSSASTNGPSGPSPVGHP

SEQ ID NO: 1079 - protein, 138 aa, Homo sapiens
QVQLVQSGAEVKKPGASVKVSCGTSGYTFTNYYIHWVRQAPGHGLEWMAWINPSGGATIYAEAFEGRVTVTTDTSMKTVYMELESLTSGDTAMYFCARDATPITTEFDYWGQGTLITVSSRLHQGPSVLPPRPPSSND

SEQ ID NO: 1080 - protein, 120 aa, Homo sapiens; identical to SEQ ID NO: 893

SEQ ID NO: 1081 - protein, 121 aa, Homo sapiens; identical to SEQ ID NO: 901

SEQ ID NO: 1082 - protein, 122 aa, Homo sapiens; identical to SEQ ID NO: 884

SEQ ID NO: 1083 - protein, 121 aa, Homo sapiens; identical to SEQ ID NO: 971

SEQ ID NO: 1084 - protein, 138 aa, Homo sapiens
QVQLVQSGAEVKKPGASMRVSCQTSGYTFNSYYIHWMRQVPGQGLEWMGWINPNSGYTNYTQKFQGRVTMTRDTSINTAYLELSALRSDETAVCYCARDFSDGWPYSFDFWGQGTLATVSSASTKAHRSSPGHPPPTT

SEQ ID NO: 1085 - protein, 121 aa, Homo sapiens; identical to SEQ ID NO: 901

SEQ ID NO: 1086 - protein, 121 aa, Homo sapiens; identical to SEQ ID NO: 971

SEQ ID NO: 1087 - protein, 120 aa, Homo sapiens; identical to SEQ ID NO: 893

SEQ ID NO: 1088 - protein, 150 aa, Homo sapiens
QVQLVQSGAEVKKPGASVKVSCGTSGYTFTNYYIHWVRQAPGHGLEWMAWINPSGGATIYAEAFEGRVTVTTDTSMKTVYMELESLTSGDTAMYFCARDATPITTEFDYWGQGTLITVSSASTKGPSVFPLATLLQRRTSGGTAALGCLV

SEQ ID NO: 1089 - protein, 151 aa, Homo sapiens
QVQLVQSGAEVKKPGASMRVSCQTSGYTFNSYYIHWMRQVPGQGLEWMGWINPNSGYTNYTQKFQGRVTMTRDTSINTAYLELSALRSDETAVYYCARDFSDGWPYSFDFWGQGTLVTVSSASTKGPSVFPLATLLQRRTSGAQRPWAAWS

SEQ ID NO: 1090 - protein, 120 aa, Homo sapiens; identical to SEQ ID NO: 893

SEQ ID NO: 1091 - protein, 124 aa, Homo sapiens; identical to SEQ ID NO: 1000

SEQ ID NO: 1092 - protein, 121 aa, Homo sapiens; identical to SEQ ID NO: 971

SEQ ID NO: 1093 - protein, 125 aa, Homo sapiens
QVQLVQSGAEVKKPGASVKVSCGTSGYTFTNYYIHWVRQAPGHGLEWMAWINPSGGATIYAEAFEGRVTVTTDTSMKTVYMELESLTSGDTAMYFCARDATPITTEFDYWGQGTLITVSSASTKA

SEQ ID NO: 1094 - protein, 121 aa, Homo sapiens; identical to SEQ ID NO: 971

SEQ ID NO: 1095 - protein, 114 aa, Homo sapiens
QVQLVQSGAEVKKPGASVKVSCGTSGYTFTNYYIHWVRQAPGHGLEWMAWINPSGGATIYAEAFEGRVTVTTDTSMKTSLHGVGEPDIWRHGHVFLRQRCDSELRNLTTWGQGT

SEQ ID NO: 1096 - protein, 115 aa, Homo sapiens; identical to SEQ ID NO: 1068

SEQ ID NO: 1097 - protein, 128 aa, Homo sapiens
QVQLVQSGAEVKKPGASVRASCRASGYSLSDYGMHWVRQAPGQGLEWMGWIKQNSGGATYAQKFQGRVIMSRDTSITTDFIELSSLTLDDTAVYYCARAQRPVADALELDYWGRGNTGHRLVSLHQRA

SEQ ID NO: 1098 - protein, 123 aa, Homo sapiens; identical to SEQ ID NO: 943

SEQ ID NO: 1099 - protein, 126 aa, Homo sapiens; identical to SEQ ID NO: 898

SEQ ID NO: 1100 - protein, 139 aa, Homo sapiens
QVQLVQSGAEVKKPGASVKVSCGTSGYTFTNYYIHWVRQAPGHGLEWMAWINPSGGATIYAEAFEGRVTVTTDTSMKTVYMELESLTSGDTAMYFCARDATPITTEFDYWGQGTLITVSSASTNGPIRSSPSATLLQRR

SEQ ID NO: 1101 - protein, 120 aa, Homo sapiens; identical to SEQ ID NO: 893

SEQ ID NO: 1102 - protein, 122 aa, Homo sapiens; identical to SEQ ID NO: 884

SEQ ID NO: 1103 - protein, 123 aa, Homo sapiens; identical to SEQ ID NO: 943

SEQ ID NO: 1104 - protein, 121 aa, Homo sapiens; identical to SEQ ID NO: 901

SEQ ID NO: 1105 - protein, 120 aa, Homo sapiens
QVQLVQSGAEVKKPGASVKVSCGTSGYTFTNYYIHWVRQAPGHGLEWMAWINPSGGVTIYAEAFEGRVTVTTDTSMKTVYMELESLTSGDTAMYFCARDATPITTEFDYWGQGTLITVSS

SEQ ID NO: 1106 - protein, 142 aa, Homo sapiens
QVQLVQSGAEVKKPGASMRVSCQTSGYTFNSYYIHWMRQVPGQGLEWMGWINPNSGYTNYTQKFQGRVTMTRDTSINTAYLELSALRSDETAVYYCARDFSDGWPYSFDFWGQGTLVTVSSASTKAHRSSPGTLLQDAPLGH

SEQ ID NO: 1107 - protein, 120 aa, Homo sapiens; identical to SEQ ID NO: 893

SEQ ID NO: 1108 - protein, 123 aa, Homo sapiens; identical to SEQ ID NO: 943

SEQ ID NO: 1109 - protein, 123 aa, Homo sapiens; identical to SEQ ID NO: 943

SEQ ID NO: 1110 - protein, 120 aa, Homo sapiens; identical to SEQ ID NO: 893

SEQ ID NO: 1111 - protein, 138 aa, Homo sapiens
QVQLVQSGAEVKKPGASMRVSCQTSGYTFNSYYIHWMRQVPGQGLEWMGWINPNSGYTNYTQKFQGRVTMTRDTSINTAYLELSALRSDETAVYYCARDFSDGWPYSFDFWGQGTLVTVSSASTKGPSGLPPGHPPPT

SEQ ID NO: 1112 - protein, 120 aa, Homo sapiens; identical to SEQ ID NO: 893

SEQ ID NO: 1113 - protein, 122 aa, Homo sapiens
QVQLVQSGAEVKKPGASMRVSCQTSGYTFNSYYIHWMRQVPGQGLEWMGWINPNSGYTNYTQKFQGRVTMTRDTSINTAYLELSALRSDETAVYYCARDFSDGWPYSFDFWGQGTLVTVSSA

SEQ ID NO: 1114 - protein, 115 aa, Homo sapiens
QVQLVQSGAELRKSGASAKVSCTATGYTFTAYYVHWVRQAPGQGLGWMGCINPQSDDTKYAQKFQGRVTMTRDTSTNTAYMELSGLTFDDTAMYYCLTAIDGIVYWGQGPLVHRF

SEQ ID NO: 1115 - protein, 121 aa, Homo sapiens; identical to SEQ ID NO: 901

SEQ ID NO: 1116 - protein, 121 aa, Homo sapiens; identical to SEQ ID NO: 901

SEQ ID NO: 1117 - protein, 124 aa, Homo sapiens; identical to SEQ ID NO: 961

SEQ ID NO: 1118 - protein, 138 aa, Homo sapiens; identical to SEQ ID NO: 954

SEQ ID NO: 1119 - protein, 121 aa, Homo sapiens; identical to SEQ ID NO: 901

SEQ ID NO: 1120 - protein, 121 aa, Homo sapiens; identical to SEQ ID NO: 1059

SEQ ID NO: 1121 - protein, 126 aa, Homo sapiens
QVQLVQSGAEVKKPGASVKVSCKASGYTFTDYFVHWVRQAPGQNFEWMGWTNVNTGGTKYAPKFQDRVTFTTDESKTTAYMELRSLRSEDTAVYYCARNTGAVATSLYSLGVWGQGTTVAVSSAST

SEQ ID NO: 1122 - protein, 153 aa, Homo sapiens
QVQLVQSGAEVKKPGASMRVSCQTSGYTFNSYYIHWMRQVPGQGLEWMGWINPNSGYTNYTQKFQGRVTMTRDTSINTAYLELSALRSDETAVYYCARDFSDGWPYSFDFWGQGTLVTVSSASTKGPSVFPLAPSSKSTSGAHAALGCLVKDY

SEQ ID NO: 1123 - protein, 124 aa, Homo sapiens; identical to SEQ ID NO: 961

SEQ ID NO: 1124 - protein, 116 aa, Homo sapiens
QVQLVQSEAEVKKPGASMKVSCKASGYSFTDYYIYWVRQVPGQGLEWMGWINPNSGGTNYAQRFQDKVSMTRDTSISTAYMELRRLISDDTAIYFCLTALDGVAYWGQGTLVTVSS

SEQ ID NO: 1125 - protein, 119 aa, Homo sapiens; identical to SEQ ID NO: 956

SEQ ID NO: 1126 - protein, 121 aa, Homo sapiens
QVQLVQSGAEVKKPGASMRVSCQTSGYTFNSYYIHWMRQVPGQGLEWMGWINPNSGYTNYTQKFQGRVTMTRDTSINTAYLELSALRSDETAVYYCARDFSDGCLTPSTSWGQGTLVTVSS

SEQ ID NO: 1127 - protein, 124 aa, Homo sapiens; identical to SEQ ID NO: 961

SEQ ID NO: 1128 - protein, 153 aa, Homo sapiens
QVQLVQSGAEVKKPGSSVKVSCKASGGTFSDYGVHWVRQAPGQGLEWMGWINHFSGGATYAEVFQGRVAMTRDTSINTAFMELRSLKFDDTALYYCARAQRPVADALELDLWGQGTLVTVSSASTKGPSVFPLATLLQDAPPRAQRPWAAWSR

SEQ ID NO: 1129 - protein, 121 aa, Homo sapiens; identical to SEQ ID NO: 901

SEQ ID NO: 1130 - protein, 144 aa, Homo sapiens
QVQLVQSGAEVKKPGASVKVSCGTSGYTFTNYYIHWVRQAPGHGLEWMAWINPSGGATIYAEAFEGRVTVTTDTSMKTVYMELESLTSGDTAMYFCARDATPITTEFDYWGQGTLITVSSRLHQRPTPVLPPRPPSSQRRHLVG

SEQ ID NO: 1131 - protein, 142 aa, Homo sapiens
QVQLVQSGAEVKKPGASMRVSCQTSGYTFNSYYIHWMRQVPGQGLEWMGWINPNSGYTNYTQKFQGRVTMTRDTSINTAYLELSALRSDETAVYYCARDFSDGWPYSFDFWGQGTLVTVSSASTRPSVFPWHPPPRRTSRGT

SEQ ID NO: 1132 - protein, 121 aa, Homo sapiens; identical to SEQ ID NO: 901

SEQ ID NO: 1133 - protein, 123 aa, Homo sapiens
QVQLVQSGAEVKKPGASMRVSCQTSGYTFNSYYIHWMRQVPGQGLEWMGWINPNSGYTNYTQKFQGRVTMTRDTSINTAYLELSALRSDETAVYYCARDFSDGWPYSFDFWGQGTLVTVSSAS

SEQ ID NO: 1134 - protein, 127 aa, Homo sapiens; identical to SEQ ID NO: 1070

SEQ ID NO: 1135 - protein, 126 aa, Homo sapiens
QVQLVQSGAEVKKPGASVKVSCGTSGYTFTNYYIHWVRQAPGHGLEWMAWINPSGGATIYAEAFEGRVTVTTDTSMKTVYMELESLTSGDTAMYFCARDATPITTEFDYWGQGTLITVSSRLHRTA

SEQ ID NO: 1136 - protein, 139 aa, Homo sapiens
QVQLVQSGAEVKKPGASMRVSCQTSGYTFNSYYIHWMRQVPGQGLEWMGWINPNSGYTNYTQKFQGRVTMTRDTSINTAYLELSALRSDETAVYYCARDFSDGWPYSFDFWGQGTLVTVSSASTNGPSVFPLATLLQRR

SEQ ID NO: 1137 - protein, 125 aa, Homo sapiens
QVQLVQSGAEVKKPGASVKVSCKTSGYTFTSYDVNWVRQAPGQRLEWIGWFNPNTGGAHYGLDYQGRVTMTGDTSITTVYMELTRLASDDTAIYYCAREGLCRTTSCQFDFWGQGTLVTVFSAST

SEQ ID NO: 1138 - protein, 121 aa, Homo sapiens; identical to SEQ ID NO: 901

SEQ ID NO: 1139 - protein, 127 aa, Homo sapiens; identical to SEQ ID NO: 1070

SEQ ID NO: 1140 - protein, 121 aa, Homo sapiens; identical to SEQ ID NO: 901

SEQ ID NO: 1141 - protein, 143 aa, Homo sapiens
QVQLVQSGAEVKKPGASMRVSCQTSGYTFNSYYIHWMRQVPGQGLEWMGWINPNSGYTNYTQKFQGRVTMTRDTSINTAYLELSALRSDETAVYYCARDFSDGWPYSFDFWGQGTLVTVSSASTKAHRSSPWPPSSKTHLWGT

SEQ ID NO: 1142 - protein, 121 aa, Homo sapiens; identical to SEQ ID NO: 901

SEQ ID NO: 1143 - protein, 124 aa, Homo sapiens; identical to SEQ ID NO: 961

SEQ ID NO: 1144 - protein, 125 aa, Homo sapiens; identical to SEQ ID NO: 1093

SEQ ID NO: 1145 - protein, 123 aa, Homo sapiens
QVQLVQSGAEVKKPGASVKVSCKASGYTFTDYFVHWVRQAPGQNFEWMGWTNVNTGGTKYAPKFQDRVTFTTDESKTTAYMELRSLRSEDTAVYYCARNTGAVATSLYSLGVWGQGTTVAVSS

SEQ ID NO: 1146 - protein, 121 aa, Homo sapiens; identical to SEQ ID NO: 901

SEQ ID NO: 1147 - protein, 121 aa, Homo sapiens; identical to SEQ ID NO: 901

SEQ ID NO: 1148 - protein, 139 aa, Homo sapiens
QVQLVQSGAEVKKPGASVKVSCGTSGYTFTNYYIHWVRQAPGHGLEWMAWINPSGGATIYAEAFEGRVTVTTDTSMKTVYMELESLTSGDTAVYFCARDATPITTEFDYWGQGTLITVSSRLHQRPIGPSPSATLLQRR

SEQ ID NO: 1149 - protein, 124 aa, Homo sapiens; identical to SEQ ID NO: 961

SEQ ID NO: 1150 - protein, 120 aa, Homo sapiens
QVQLVQSGAEVKKPGASVKVSCGTSGYTFTNYYIHWVRQAPGHGLEWMAWINPSGGATIYAEAFEGRVTVTTDTSMKTVYMELESLTSGDTAVYFCARDATPITTEFDYWGQGTLITVSS

SEQ ID NO: 1151 - protein, 127 aa, Homo sapiens; identical to SEQ ID NO: 1070

SEQ ID NO: 1152 - protein, 120 aa, Homo sapiens
QVQLVQSGAEVKTPGASVKVSCRTSGYTFTAYYIHWVRQALGHGLEWVGWINPSGGATIYAQKFEGRVTLTSDTSISTAYLELSNLRPDDTATYYCVRDATPVTTEFDFWGQGALVTVSS

SEQ ID NO: 1153 - protein, 125 aa, Homo sapiens
QVQLVQSGPEVKKPGASLKVSCKASEYTFIDYYIHWVRQVPGQRLEWMGWINPKTTGALYADNFQGRVTMTSDTSINTVYMEVTRLTSDDTAVYFCAREGHCSSTNCFFDSWGQGTLVTVSSAST

SEQ ID NO: 1154 - protein, 124 aa, Homo sapiens
QVQLVQSGAEVKKPGASMRVSCQTSGYTFNSYYIHWMRQVPGQGLEWMGGLTPNSGYTNYTQKFQGRVTMTRDTSINTAYLELSALRSDETAVYYCARDFSDGWPYSFDFWGQGTLVTVSSAST

SEQ ID NO: 1155 - protein, 116 aa, Homo sapiens
QVQLVQSGAELRKSGASAKVSCTATGYTFTAYYVHWVRQAPGQGLEWMGCINPQSDDTKYAQKFQGRVTMTRDTSTNTAYMELSGLTFDDTAMYYCLTAIDGIVYWGQGPLVHRFL

SEQ ID NO: 1156 - protein, 112 aa, Homo sapiens
QVQLVQSGAELRKSGASAKVSCTATGYTFTAYYVHWVRQAPGQGLEWMGCINPQSDDTKYAQKFQGEVTMTRDTSTNTAYMELSGLTFDDTAMYYCLTAIDGIVYWGQGPLV

SEQ ID NO: 1157 - protein, 121 aa, Homo sapiens
QVQLVQSGAEVKRPGASVRVSCRTSGYSFTAYYIHWVRQAPGQGLEWMGRLNPNTGGADSSQKFQGRVTLTRDTSINTAYMDLRRLRVDDSATYYCASGIQAGGANYWGQGTLVTVSSAST

SEQ ID NO: 1158 - protein, 122 aa, Homo sapiens
QVQLGQSGAEMKKPGASVMLSCKTSGYNFIDYYIYWVRLAPGRGLQWMGWINPNRGGTKYAETFRDRLTMTRDTPVSTAYMELNNLRSDDTAVYYCARLQSLHGLYSNADYWGQGTLVTVSS

SEQ ID NO: 1159 - protein, 125 aa, Homo sapiens
QVQLVQSGPEVKKPGASLKVSCKASGYTFIDYYIHWVRQVPGQRLEWMGWINPKTTGALYADNFQGRVTMTSDTSINTVYMEVTRLTSDDTAVYYCAREGHCSSTNCFLTRWGQGTLVTVSSRLH

SEQ ID NO: 1160 - protein, 115 aa, Homo sapiens
QVQLVQSGAELRKSGASAKVSCTATGYTFTAYYVHWVRQAPGQGLEWMGCINPQSDDTKYAQKFQGRVTMTRDTSTNTAYMELSGLTFDDTAMYYCLTAIDGIVYWGQGPLVHRF

SEQ ID NO: 1161 - protein, 120 aa, Homo sapiens
QVQLVQSGTDVRKPGASVKVSCKASGYTFSDYYIHWVRQAPGQRLEWIGWFNPNTGGAHYGLDYQGRVTMTGDTSITTVYMELTRLASDDTAIYYCAREGLELLAANLTSWGQGRWSPSS

SEQ ID NO: 1162 - protein, 124 aa, Homo sapiens
QVQLVQSGAEVKRPGASVRVSCKASGYSFTAYFLHWVRQAPGQGLEFMGRLNPNTGATDFPQKFQGRVTVTRDTSISTAYMEVYGLRPEDTAVYYCAAGIQAGGANYWGQGTLVTVSSASTKGP

SEQ ID NO: 1163 - protein, 115 aa, Homo sapiens
QVQLVQSGAEVKTPGASVKVSCRTSGYTFTAYYIHWVRQAPGHGLEWVGWINCNSAGTFYAQKFQGRVIMTRDTSNNTVYMQLNSLNSDDTAVYYCARVTSPGVWGKGTTVTVSS

SEQ ID NO: 1164 - protein, 135 aa, Homo sapiens
QVQLVQSGAEVKKPGASVKVSCKASGYTFTDYYLHWVRQAPGQGLEWMGWIMPNTGGVHSSPKFQGRFSVTRDTSTSTAYMQLSRLTSDDTAVYYCARTDGDFIDYWGQGTLVTVSSASTKGPSVFPWRPASRTH

SEQ ID NO: 1165 - protein, 126 aa, Homo sapiens
QVQLVQSGTEVRNPGASVKVSCKASGYRFTDYFIHWMRQAPGQGLEWMGWIDPHGGGTNYAQKFQGRVTLVRDASISMAYMELSSLTSDDTALYFCAREVDTSLDLLIYYMDVWGKGPRSPSPQGV

SEQ ID NO: 1166 - protein, 140 aa, Homo sapiens
QVQLVQSGPEVKKPGASLKVSRKASGYTFIDYYIHWVRQVPGQRLEWMGWINPKTTGALYADNFQGRVTMTSDTSINTVYMEVTRLTSDDTAVYYCAREGHCSSTNCFFDSWGQGTLVTVSSASTNGPIGLPPGHPPPTT

SEQ ID NO: 1167 - protein, 118 aa, Homo sapiens
QVQLVQSGSEMKKPGASVKVSCKTSGYTFTDYYIHWVRQAPGQGLEWMGWINCNSAGTFYAQKFQGRVIMTRDTSNNTVYMQLNSLNSDDTAVYYCARVSPPDVWGKGTTVTVSSAST

SEQ ID NO: 1168 - protein, 118 aa, Homo sapiens
QVQLGQSGAEMKKPGASVMLSCKTSGYNFIDYYIYWVRLAPGRGLQWMGWINPNRGGTKYAETFRDRLTMTRDTSVSTAYMELNNLRSDDTAVYYCARLQSLHGLYSNADYWGQGTLV

SEQ ID NO: 1169 - protein, 123 aa, Homo sapiens
QVQLVQSGAEVKKPGASVRVTCRASGFSVSDYGVHWVRQAPGQGLEWMGWINHFSGGATYAEVFQGRVAMTRDTSINTAFMELRSLRSDDTAVYYCARDTPRYCSSTSCYMEVWGKGTTVTVS

SEQ ID NO: 1170 - protein, 120 aa, Homo sapiens
QVQLVQSGAEMKKPGASVKVSCKTSGYTFTDYYIHWVRQAPGHGLEWMAWINPSGGATIYAEAFEGRVTVTTDTSMKTVYMELESLTSGDTAMYFCARDATPITTEFDYWGQGTLITVSS

SEQ ID NO: 1171 - protein, 133 aa, Homo sapiens
QVQLVQSGAEVKTPGASVKVSCRTSGYTFTAYYIHWVRQAPGHGLEWVGWINPSGGATIYAQKFEGRVTLTSDTSISTAYLELSNLRPDDTATYYCVRDATPVTTEFDFWGQGALVTVSSRLHHGPSGPSPVG

SEQ ID NO: 1172 - protein, 124 aa, Homo sapiens
QVQLVQSGAEVKKPGASVRVSCKASGSSLHAYYIHWVRQAPGQRPEWMGWLNPNSGGTNYAPKFQDRVTLTRETSIGTTHLGLRGLGSDDTAVYYCATDRLGPQGYINYYFESWGQGALITVSS

SEQ ID NO: 1173 - protein, 120 aa, Homo sapiens
QVQLVQVWVEVKKPWASMKVSCKASGYNFTGYFIHWVRQGPGQGLEWMGWMNPNTGGAKYAQKFQGRVTMTRDTSIRTAYMELSSLKTRDTAVYYCARDPQDGTTWYTHWGQGTLVTVSS

SEQ ID NO: 1174 - protein, 122 aa, Homo sapiens
QVQLVQSGTEVKKPGASLKVSCKASGYTFIDYYIHWVRQVPGQRLEWMGWINPKTTGALYADNFQGRVTMTSDTSINTVYMEVTRLTSDDTALYYCAREGHCGSTNCFFDFWGQGTLVTVSS

SEQ ID NO: 1175 - protein, 122 aa, Homo sapiens
QVQLGQSGAEMKKPGASVMLSCKTSGYNFIDYYIYWVRLAPGRGLQWMGWINPNRGGTKYAETFRDRLTMTRDTSVSTAYMELNNLRSDDTAVYYCARLQSLHGLYSNADYWGQGTLVTVSS

SEQ ID NO: 1176 - protein, 148 aa, Homo sapiens
QVQLVQSGAELRKSGASAKVSCTATGYTFTAYYVHWVRQAPGQGLEWMGCINPQSDDTKYAQKFQGRVTMTRDTSTNTAYMELSGLTFDDTAMYYCLTAIDGIVYWGQGPLVTVSSASTKGPSVFPLAPSSKSTSGGTAALAAWSRTT

SEQ ID NO: 1177 - protein, 127 aa, Homo sapiens
QVQLVQSGAEVKKPGASVRVSCKASGSSLHAYYIHWVRQAPGQRPEWMGWLNPNSGGTNYAPKFQDRVTLTRETSIGTTHLGVRGLGSDDTAVYYCATDRLGPQGYINYYFESWGQGALITVSSAST

SEQ ID NO: 1178 - protein, 115 aa, Homo sapiens
QVQLVQSGAELRKSGASAKVSCTATGYTFTAYYVHWVRQAPGQGLEWMGCINPQSDDTKYAQKFQGRVTMTRDTSTNTAYMELSGLTFDDTAMYYCLTAIDGIVYWGQGPLVTVP

SEQ ID NO: 1179 - protein, 113 aa, Homo sapiens
QVQLVQSGADVKESGASLKVSCKASGHTFAAYYVHWVRQAPGQGLEWMGWIQPNSGVTKNAQTFRGRLTMTRDTSINTVYMELSRLRFDDTALYYCTERLREWGQGSLVTVSS

SEQ ID NO: 1180 - protein, 139 aa, Homo sapiens
QVQLVQSGPEVKKPGASLKVSCKASGYTFIDYYIHWVRQVPGQRLEWMGWINPKTTGALYADNFQGRVTMTSDTSINTVYMEVTRLTSDDTAVYYCAREGHCSSTNCFFDSWGQGTLVTVSSGSASAPTLFPLVSSENS

SEQ ID NO: 1181 - protein, 116 aa, Homo sapiens; identical to SEQ ID NO: 1155

SEQ ID NO: 1182 - protein, 126 aa, Homo sapiens
QVQLVQSGSEMKKPGASVKVSCKTSGYTFTDYYIHWVRQAPGQGLEWMGWINCNSAGTFYAQKFQGRVIMTRDTSKQHCLHATEPEFRRHGRLLLCESESPGVWGKGTTVTVSSASTKGPSGLPPG

SEQ ID NO: 1183 - protein, 109 aa, Homo sapiens
QVQLVQSGAELRKSGASAKVSCTATGYTFTAYYVHWVRQAPGQGLEWMGCINPQSDDTKYAQKFQGRVTMTRDTSTNTAYMELSGLTFDDTAMYYCLTAIDGIVYWGQG

SEQ ID NO: 1184 - protein, 122 aa, Homo sapiens
QVQLVQSGAELRKSGASAKVSCTATGYTFTAYYVHWVRQAPGQGLEWMGCINPQSDDTKYAQKFQGRVTMTRDTSTNTAYMELSGLTFDDTAMYYCLTAIDGIVYWGQGPLVTVSSRLHQRT

SEQ ID NO: 1185 - protein, 121 aa, Homo sapiens
QVQLVQSGAEVRKPGASVKVSCTASGYTFTGHYILWVRQARGQGLEWVGWINGDRGDTKYSHKFQGRVVMTRDRSTSTVSMELSRLTSDDTAIYYCARDLVRDGYDALDIWGRGTLVTVSS

SEQ ID NO: 1186 - protein, 143 aa, Homo sapiens
QVQLVQSGTEVKKPGASLKVSCKASGYTFIDYYIHWVRQVPGQRLEWMGWINPKTTGALYADNFQGRVTMTSDTSINTVYMELTRLTSDDTALYYCAREGHCGSTNCLFDFWGQGTLVTVSSASTKAHRSSPAPCSRSTSETH

SEQ ID NO: 1187 - protein, 125 aa, Homo sapiens
QVQLVQSGTEVKKPGASLKVSCKASGYTFIDYYIHWVRQVPGQRLEWMGWINPKTTGALYADNFQGRVTMTSDTSINTVYMEVTRLTSDDTALYYCAREGHCGSTNCFFDFWGQGTLVTVSSAST

SEQ ID NO: 1188 - protein, 109 aa, Homo sapiens; identical to SEQ ID NO: 1183

SEQ ID NO: 1189 - protein, 140 aa, Homo sapiens
QVQLVQSGAEVKESGASVKVSCEASTYTFIGYYLHWVRQAPGQGLEWMGWINPDNGATNYAQKFQGRVTMTRVTSINTAYMDLNNLTSDDTAVYFCARAEGIWLGEPAPFDLWGQGTMVIVSLGSASAPTLFPSSPLRIP

SEQ ID NO: 1190 - protein, 122 aa, Homo sapiens
QVQLVQSGAEMKKPGASVKVSCKASGYTFTAFYIHWLRQAPGQGPEWMGWINPINGATIYAETFEGRVTLTRDTSTNTAYMELSSLKSYDTAVYYCARDAPPITTEFDQWGQGTLVTRLLSL

SEQ ID NO: 1191 - protein, 119 aa, Homo sapiens
QVQLVQSGAEVKKPGASVKVSCTATGYTFTAYYVHWVRQAPGQGLEWMGCINPQSDDTKYAQKFQGRVTMTRDTSTNTAYMELSGLTFDDTAMYYCLTAIDGIVYWGQGPLVHRFLDGT

SEQ ID NO: 1192 - protein, 126 aa, Homo sapiens
QVQLVQSGAEMMKPGATLKVSCKTSGYTFTKFYIHWVRQAPGQGLEWMGWINPTSGNTKSAQKFQGRVTMTSDTSINTAYTELSKLRSDDAAIYYCAKLADYYNSENGALEIWGQGTMVTVSSAST

SEQ ID NO: 1193 - protein, 118 aa, Homo sapiens
QVQLVQSGAEMKKPGASVKVSCKASGYTFTAFYIHWLRQAPGQGPEWMGWINPINGATIYAETFEGRVTLTRDTSTNTAYMELSSLKSYDTAVYYCARDAPPITTEFDQWGQGTLVSV

SEQ ID NO: 1194 - protein, 115 aa, Homo sapiens
QVQLVQSGAELRKSGASAKVSCTATGYTFTAYYVHWVRQAPGQGLEWMGCINPQSDDTKYAQKFQGRVTMTRDTSTNTAYMELSGLTFDDTAMYYCLTAIDGIVYWGQGTLVTVS

SEQ ID NO: 1195 - protein, 115 aa, Homo sapiens; identical to SEQ ID NO: 1160

SEQ ID NO: 1196 - protein, 128 aa, Homo sapiens
QVQLVQSGAEVRPPGASVKVSCKASGYTFTAYDMHWVRQASGQGLEWMGRVNPNNGATKVAEKFRGRVSMTTDTSITTAYMDIHGLTSDDTAVYYCARDRGDHVYYYAMDTWGRGTTVSVSSASTKGP

SEQ ID NO: 1197 - protein, 121 aa, Homo sapiens
QVQLVQSGAEVRKPGASVKVSCTASGYTFTGHYILWVRQAPGQGLEWVGWINGDRGDTKYSHKFQGRVVMTRDRSTSTVSMELSRLTSDDTAIYYCARDLVRDGYDALDIWGRGTLVTVSS

SEQ ID NO: 1198 - protein, 126 aa, Homo sapiens
QVQLVQSGAEMMKPGATLKVSCKTSGYTFTKFYIHWVRQAPGQGLEWMGWINPTSGNTKSAQKFQGRVTMTSDTSINTAYMELSKLRSDDAAIYYCAKLADYYNSENGALEIWGQGTMVTVSSAST

SEQ ID NO: 1199 - protein, 128 aa, Homo sapiens
QVQLVQSGAEVRPPGASVKVSCKASGYTFTAYDMHWVRQAPGQGLEWMGRVNPNNGATKVAEKFRGRVSMTTDTSITTAYMDIHGLTSDDTAVYFCARDRGDHFYYYAMDTWGRGTTVSVSSASTNGP

SEQ ID NO: 1200 - protein, 122 aa, Homo sapiens; identical to SEQ ID NO: 1174

SEQ ID NO: 1201 - protein, 146 aa, Homo sapiens
QVQLVQSGADVKEPGASLKVSCKASGHTFAAYYVHWVRQAPGQGLEWMGWIQPNSGVTKNAQTFRGRLTMTRDTSINTVYMELSRLRFDDTALYYCTERLREWGQGSLVTVSSASTKGPSGLPPGRPAPGRTSESTAALGCLVKDY

SEQ ID NO: 1202 - protein, 122 aa, Homo sapiens
QVQLVQSGAEVKKPGASVKVSCGASGYTFSNYYIHWLRQAPGQGLEWMAWINPSGGATIYAENFQGRVTVTRDTSMETVYMELNSLTSGDTAVYYCARDATPITTEFDFWGQGTLITVSSRL

SEQ ID NO: 1203 - protein, 118 aa, Homo sapiens
QVQLVQSGADVKKPGASVKVSCKASGYNFITYYIHLVRQAPGQGLEWMGCINPNSGGTNYAQRFQDKVSMTRDTSISTAYMELRRLISDDTAIYFVSLHMVSRTWGQGTLVTVSVTPP

SEQ ID NO: 1204 - protein, 165 aa, Homo sapiens
QVQLVQSGAEVRPPGASVKVSCKASGYTFTAYDMHWVRQAPGQGLEWMGRVNPNNGATKVAEKFRGRVSMTTDTSITTAYMDIHGLTSDDTAVYFCARDRGDHFYYYAMDTWGRGTTVSVSSASTKGPSVFPLAPSSKSTSGGTAALGCLVKDYFPEPVTVSWNS

SEQ ID NO: 1205 - protein, 120 aa, Homo sapiens
QVQLVQSGAEVKKPGASVKVSCGASGYTFSNYYIHWLRQAPGQGLEWMAWINPSGGATIYAENFQGRVTVTRDTSMETVYMELNSLTSGDTAVYYCARDATPITTEFDFWGQGTLITVSS

SEQ ID NO: 1206 - protein, 138 aa, Homo sapiens
QVQLVQSGAEVRPPGASVKVSCKASGYTFTAYDMHWVRQAPGQGLEWMGRINPNNGATKVAEKFRGRVSMTTDTSITTAYMDIHGLTSDDTAVYFCARDRGDHFYYYAMDTWGRGTTVSVSSASTKAHRSSPRPPSSN

SEQ ID NO: 1207 - protein, 147 aa, Homo sapiens
QVQLVQSGADVKKPGASVKVSCKASGYNFITYYIHWVRQAPGQGLEWMGCINPNSGGTNYAQRFQDKVSMTRDTSISTAYMELRRLISDDTAIYFCLTALDGVAYWGQGTLVTVSSASTKGPSVFPWHPPPRRTSGAQQPWLPGQGL

SEQ ID NO: 1208 - protein, 128 aa, Homo sapiens
QVQLVQSGAEVRPPGASVKVSCKASGYTFTAYDMHWVRQAPGQGLEWMGRVNPNNGATKVAEKFRGRVSMTTDTSITTAYMDIHGLTSDDTAVYFCARDRGDHFYYYAMDTWGRGTTVSVSSRLHQRA

SEQ ID NO: 1209 - protein, 119 aa, Homo sapiens
QVQLVQSGADVKEPGASLKVSCKASGHTFAAYYVHWVRQAPGQGLEWMGWIQPNSGVTKDAQTFRGRLTMTRDTSINTVYMELSRLRFDDTALYYCTERLREWGQGSLVTVSSRLHQRA

SEQ ID NO: 1210 - protein, 122 aa, Homo sapiens
QVQLVQSGTEVKKPGASLKVSCKASGYTFIDYYIHWVRQVPGQRLEWMGWINPKTTGALYADNFQGRVTMTSDTSINTVYMEVTRLTSDDTALYYCAREGHCGSTNCLFDFWGQGTLVTVSS

SEQ ID NO: 1211 - protein, 119 aa, Homo sapiens
QVQLVQSGAEVKKPGASVKVSCKASGYIFAGYYMEWVRQTPGQGLEWMGWIDPSGGATIYAEAFEGRVTVTTDTSMKTVYMELESLTSGDTAMYFCARDATPITTEFDYWGQGTLITVS

SEQ ID NO: 1212 - protein, 119 aa, Homo sapiens
QVQLVQSGADVKEPGASLKVSCKASGHTFAAYYVHWVRQAPGQGLEWMGWIQPNSGVTKNAQTFRGRLTMTRDTSINTVYMELSRLRFDDTALYYCTERLREWGQGSLVTVSSASTNGP

SEQ ID NO: 1213 - protein, 146 aa, Homo sapiens
QVQLVQSGSEVRKPGASVKVSCKTSGYTFIDYYIHWVRQAPGQGLQWMGWVNCNSGDTFYGQRFQGRVTMTRDTSNNTVYMETEQAEFRRHGRVLLWESESPGVWGKGTTVIVSSASTKGPSVFPLATLLQDAPRRGTSGPGLPGQ

SEQ ID NO: 1214 - protein, 126 aa, Homo sapiens
QVQLVQSGPEVKKPGASVKVSCKASGYTRNTYYVHWVRQAPGQGLEWMGWINPNSGGTNYAQKFQGRLTITTDELRTTAYMELSSLKSEDTAVYYCARNTDSVATSLYSLGVWGQGTVVTVSSAST

SEQ ID NO: 1215 - protein, 165 aa, Homo sapiens
QVQLVQSGTEVKKPGASLKVSCKASGYTFIDYYIHWVRQVPGQRLEWMGWINPKTTGALYADNFQGRVTMTSDTSINTVYMEVTRLTSDDTALYYCAREGHCGSTNCFFDFWGQGTLVTVSSASTKGPSVFPLGTLLQDAPLGHSGPGLPGQGLLPRTGDGVVEL

SEQ ID NO: 1216 - protein, 119 aa, Homo sapiens
QVQLVQSGAEVKKSGASVKVSCKTSGYTFTSYDINWVRQVTGQGLEWMGWMNPNSGGTNYAQRFQDKVSMTRDTSISTAYMELRRLISDDTAIYFCLTALDGVAYWGQGTLVTVSSAST

SEQ ID NO: 1217 - protein, 122 aa, Homo sapiens
QVQLVQSGADVKKPGASVKVSCRPLDITSSLTIYIGCDRPPGQGLEWMGCINPNSGGTNYAQRFQDKVSMTRDTSISTAYMELRRLISDDTAIYFCLTALDGVAYWGQGTLVTVSSASTNGP

SEQ ID NO: 1218 - protein, 123 aa, Homo sapiens
QVQLVQSGTDVRKPGASVKVSCKASGYTFTDYYIHWVRQAPGQRLEWMGWFNPNTGGAHYGLDYQGRVTMTGDTSMTTVYMELTRLASDDTAIYYCAREGLCRTTSCQFDYWGQGTLVTVFSR

SEQ ID NO: 1219 - protein, 117 aa, Homo sapiens
QVQLVQSGADVKKPGASVKVSCKASGYNFITYYIHWVRRAPGQGLEWMGCINPNSGGTNYAQRFQDKVSMTRDTSISTAYMELRRLISDDTAIYFCLTALDGVAYWGQGTLVTVSSR

SEQ ID NO: 1220 - protein, 122 aa, Homo sapiens
QVQLVQFGADMKKPGSSVKVTCKASGDGFTSYAVSWVRQAPGQGLEWMGWINPNRGGTKYAQKFQGRVTMTRDTAVNTAYMELNSLRSDDTAVYYCARLQSLSGFYSNADYWGQGTLVTVSS

SEQ ID NO: 1221 - protein, 122 aa, Homo sapiens
QVQLEQSGAEVKKPGASVMLSCKTSGYTFIDYYIYWVRLAPGRGLQWMGWMNPNRGGTKYAETFRDRVTMTRDTSVSTAYMELNNLRSDDTAVYYCARLQSLHGLYSNADYWGQGTLVTVSS

SEQ ID NO: 1222 - protein, 135 aa, Homo sapiens
QVQLVQSGADVKKPGASVKVSCKASGYNFITYYIHWVRQAPGQGLEWMGCINPNSGGTNYAQRFQDKVSMTKDTSISTAYMELRRLISDDTAIYFCLTALDGVAYWGQGTLVTVSSASTNGPTRSSPSATLPPTT

SEQ ID NO: 1223 - protein, 116 aa, Homo sapiens
QVQLVQSGADVKKPGASVKVSCKASGYNFITYYIHWVRRAPGQGLEWMGCINPNSGGTNYAQRFQDKVSMTRDTSISTAYMELRRLISDDTAIYFCLTALDGVAYWGQGTLVTVSS

SEQ ID NO: 1224 - protein, 122 aa, Homo sapiens
QVQLVQSGTDVRKPGASVRVSCKASGYTFTDYYIHWVRQAPGQRLEWMGWFNPNTGGAHYGLDYQGRVTMTGDTSITTVYMELTRLASDDTAIYYCAREGLCGTTSCQFDFWGQGTLVTVFS

SEQ ID NO: 1225 - protein, 124 aa, Homo sapiens
QVQLVQSGAEVKKPGASVKVSCRASGYRFTGYYVHWVRQAPGEGLEWMGINPNDGNTVYSQKYQGRVSMTWDMSIYTAYMEMSRLTSDDTAVYYCASPSPALGYFSYYMDVWGKGPRSSSSSRL

SEQ ID NO: 1226 - protein, 116 aa, Homo sapiens
QVQLVQSGADVKKPGASVKVSCKASGYNFITYYIHWVRQAPGQGLEWMGCINPNSGGTNYAQRFQDKVSMTRDTSISTAYMELRRLISDDTAIYFCLTALDGVAYWGQGTLVTVSS

SEQ ID NO: 1227 - protein, 119 aa, Homo sapiens
QVQLVQSGADVKKPGASVKVSCKASGYNFITYYIHWVRQAPGQGLEWMGCINPNSGGTNYAQRFQDKVSMTRDTSISTAYMELRRLISDDTAIYFCLTALDGVAYWGQGTLVTVSSRLH

SEQ ID NO: 1228 - protein, 116 aa, Homo sapiens; identical to SEQ ID NO: 1226

SEQ ID NO: 1229 - protein, 122 aa, Homo sapiens
QVQLVQSGADVKKPGASVKVSCKASGYNFITYYIHWVRQAPGQGLEWMGCINPNSGGTNYAQRFQDKVSMTRDTSISTAYMELRRLISDDTAIYFCLTALDGVAYWGQGTLVTVSSRLHQRP

SEQ ID NO: 1230 - protein, 122 aa, Homo sapiens
QVQLVQSGTDVRKPGASVKVSCKASGYTFTDYYIHWVRQAPGQRLEWMGWFNPNTGGAHYGLDYQGRVTMTGDTSMTTVYMELTRLASDDTAIYYCAREDFVELPAANLTTWGQGTRGHRLL

SEQ ID NO: 1231 - protein, 116 aa, Homo sapiens
QVQLVQSGADVKKPGASVKVSCKASGYNFITYYIHWVRQAPGQGLEWMGCINPNSGGTNYAQRFQDKVSMTRDTSISTAYMELRRLISDDTAIYFCLTALDGVAYWGQGTRGHRLL

SEQ ID NO: 1232 - protein, 122 aa, Homo sapiens
QVQLVQSGAELKKPGASVKVSCKASGYTFTAFYIHWVRQAPGQGLEWMGWISPDSGNTKYVERFQGGVTMTRDTSTNTAYMELSRLGPDDTAVYYCMRINRGAYYFEYWGQGTLVTVSSAST

SEQ ID NO: 1233 - protein, 116 aa, Homo sapiens
QVQLVQSGADVKKPGASVRVSCKASGYNFITYYIHWVRQAPGQGLEWMGCINPNSGGTNYAQRFQDKVSMTRDTSISTAYMELRRLISDDTAIYFCLTALDGVAYWGQGTLVTVSS

SEQ ID NO: 1234 - protein, 110 aa, Homo sapiens
QVQLVQSGADVKKPGASVKVSCKASGYNFITYYIHWVRQAPGQGLEWMGCINPNSGGTNYAQRFQDKVSMTRDTSISTAYMELRRLISDDTAIYFCLTALDGVAYWGQGT

SEQ ID NO: 1235 - protein, 120 aa, Homo sapiens
QVQLVQSGAEVKKPGASVKVSCKASGYIFSGHYMNWVRQAPGQGLEWMGWINPASGGTRYAQRFQDKVSMTRDTSISTAYMELRRLISDDTAIYFCLTALDGVAYWGQGTLVTVSSRLHQ

SEQ ID NO: 1236 - protein, 121 aa, Homo sapiens
QVQLVQSGADVKKPGASVKVSCKASGYNFITYYIHWVRQAPGQGLEWMGCINPNSGGTNYAQRFQDKVSMTRDTSISTAYMELRRLISDDTAIYFCLTALDGVAYWGQGTLVTVSSRLHQR

SEQ ID NO: 1237 - protein, 119 aa, Homo sapiens; identical to SEQ ID NO: 1227

SEQ ID NO: 1238 - protein, 116 aa, Homo sapiens; identical to SEQ ID NO: 1233

SEQ ID NO: 1239 - protein, 125 aa, Homo sapiens
QVQLVQSGTDVRKPGASVKVSCKASGYTFTDYYIHWVRQAPGQRLEWMGWFNPNTGGAHYGLDYQGRVTMTGDTSMTTVYMELTRLASDDTAIYYCAREGLCRTTSCQFDYWGQGTLVTVFSAST

SEQ ID NO: 1240 - protein, 119 aa, Homo sapiens
QVQLVQSGTEVKKPGASVMVTCKASGYSFNDYYVNWVRQAPGQGLEWMGWINPKTGDTNYARKFQGRVSMTRDTFINTAYIDLNKLKSDDTAVYYCAIGSGQPWLLMSWGRGTVGHRLF

SEQ ID NO: 1241 - protein, 122 aa, Homo sapiens
QVQLVQSGADVKKPGASVKVSCKASGYNFITYYIHWVRQAPGQGLEWMGCINPNSGGTNYAQRFQDKVSMTRDTSISTAYMELRRLISDDTAIYFCLTALDGVAYWGQGTLVTVSSRLHQRA

SEQ ID NO: 1242 - protein, 134 aa, Homo sapiens
QVQLVQSGADVKKPGASVKVSCKASGYNFITYYIHWVRQAPGQGLEWMGCINPNSGGTNYAQRFQDKVSMTRDTSISTAYMELRRLISDDTAIYFCLTALDGVAYWGQGTLVTVSSASTKGPSVFPLATLLQRR

SEQ ID NO: 1243 - protein, 116 aa, Homo sapiens; identical to SEQ ID NO: 1226

SEQ ID NO: 1244 - protein, 117 aa, Homo sapiens
QVQLVQSGADVKKPGASVRVSCKASGYNFITYYIHWVRQAPGQGLEWMGCINPNSGGTNYAQRFQDKVSMTRDTSISTAYMELRRLISDDTAIYFCLTALDGVAYWGQGTRGHRLLT

SEQ ID NO: 1245 - protein, 122 aa, Homo sapiens
QVQLVQSGTDVRKPGASVKVSCKASGYTFTDYYIHWVRQAPGQRLEWMGWFNPNTGGAHYGLDYQGRVTMTGDTSMTTVYMELTRLASDDTAIYYCAREGLCRTTSCQFDYWGQGTLVTVFS

SEQ ID NO: 1246 - protein, 131 aa, Homo sapiens
QVQLVQSGTEVKKPGASVMVTCKASGYSFNDYYVNWVRQAPGQGLEWMGWINPKTGDTNYARKFQGRVSMTRDTFINTAYIDLNKLKSDDTAVYYCAIGSGQPWALDVWGRGTLVTVSSASTRPSVSPAPA

SEQ ID NO: 1247 - protein, 121 aa, Homo sapiens
QVQLVQSGTDVRKPGASVKVSCKASGYTFTDYYIHWVRQAPGQRLEWMGWFNPNTGGAHYGLDYQGRVTMTGDTSMTTVYMELTRLASDDTAIYYCAREGLELPAANLTTWGQGTLVTVFS

SEQ ID NO: 1248 - protein, 119 aa, Homo sapiens; identical to SEQ ID NO: 1227

SEQ ID NO: 1249 - protein, 124 aa, Homo sapiens
QVQLVQSGTDVRKPGASVKVSCKASGYTFTDYYIHWVRQAPGQRLEWMGWFNPNTGGAHYGLDYQGRVTMTGDTSITTVYMELTRLASDDTAIYYCAREGLELPAANLTSWGQGTRGHRLLSLH

SEQ ID NO: 1250 - protein, 114 aa, Homo sapiens
QVQLVQSGADVKKPGASVKVSCKASGYNFITYYIHWVRQAPGQGLEWMGCINPNSGGTNYAQRFQDKVSMTRDTSISTAYMELRRLISDDTAIYFCLTALDGVAYWGQGTLVTV

SEQ ID NO: 1251 - protein, 116 aa, Homo sapiens; identical to SEQ ID NO: 1231

SEQ ID NO: 1252 - protein, 118 aa, Homo sapiens
QVQLVQSGADVKKPGASVKVSCKASGYNFITYYIHWVRQAPGQGLEWMGCINPNSGGTNYAQRFQDKVSMTRDTSISTAYMELRRLISDDTAIYFCLTALDGVAYWGQGTLVTVSSRL

SEQ ID NO: 1253 - protein, 134 aa, Homo sapiens
QVQLVQSGADVKKPGASVKVSCKASGYNFITYYIHWVRQAPGQGLEWMGCINPNSGGTNYAQRFQDKVSMTRDTSISTAYMELRRLISDDTAIYFCLTALDGVAYWGQGTLVTVSSASTKVHRSFPLGHPPPTT

SEQ ID NO: 1254 - protein, 130 aa, Homo sapiens
QVQLVQSGADVKKPGASVRVSCKASGYNFITYYIHWVRQAPGQGLEWMGCINPNSGGTNYAQRFQDKVSMTRDTSISTAYMELRRLISDDTAIYFCLTALDGVAYWGQGTLVTVSSRLHQRAQSGPSPVG

SEQ ID NO: 1255 - protein, 117 aa, Homo sapiens
QVQLVQSGADVKKPGASVKVSCKASGYNFITYYIHWVRQAPGQGLEWMGCINPNSGGTNYAQRFQDKVSMTRDTSISTAYMELRRLISDDTAIYFCLTALDGVAYWGQGTLVTVSSR

SEQ ID NO: 1256 - protein, 137 aa, Homo sapiens
QVQLVQSGADVKKPGASVKVSCKASGYNFITYYIHWVRQAPGQGLEWMGCINPNSGGTNYAQRFQDKVSMTRDTSISTAYMELRRLISDDTAIYFCLTALDGVAYWGQGTLVTVSSRLHQRAHPVLPPRPPSSNDAT

SEQ ID NO: 1257 - protein, 121 aa, Homo sapiens
QVQLVQSGAEVKKPGASVMVSCKASGYTFTDYYIYWVRQAPGQGLEWMGWINPNRGGTKYAQKFQGRSPPGRRPSTRAYLELNSLKSDDTAVYYCARLQSLHGFYSNADYWGQGTLVHRLL

SEQ ID NO: 1258 - protein, 146 aa, Homo sapiens
QVQLVQSGAEVKKPGASVKVSCRASGYRFTGYYVHWVRQAPGEGLEWMGWINPNDGNTVYSQKYQGRVSMTWDMSIYTAYMEMSRLTSDDTAVCYCARDPSPTPYYYDSSGYLSGGMDVWGQGTTVTVSVRECIRPTFSPRLLDFP

SEQ ID NO: 1259 - protein, 128 aa, Homo sapiens
QVQLVQSVSEIKKLGASVKVSCKASGYPFTNYFIHWVRQAPGQGLEWMAWINPHSGETHYAQKFQGRVTLTRDTSISTAYMDVSGLRSDDTALYYCARGWTMVQLPIATRYYYYMDVWGKGTTVIVSS

SEQ ID NO: 1260 - protein, 145 aa, Homo sapiens
QVQLVQSGTDVRKPGASVKVSCKASGYTFTDYYIHWVRQAPGQRLEWMGWFNPNTGGAHYGLDYQGRVTMTGDTSMTTVYMELTRLASDDTAIYYCAREGLCRTTSCQFDYWGQGTLVTVFSRLHQRPIRSSPSATLLPTTHLVG

SEQ ID NO: 1261 - protein, 125 aa, Homo sapiens
QVQLVQSGTDVRKPGASVKVSCKASGYTFTDYYIHWVRQAPGQRLEWMGWFNPNTGGAHYGLDYQGRVTMTGDTSITTVYMELTRLASDDTAIYYCAREGLCRTTSCQFDFWGQGTLVTVFSRLH

SEQ ID NO: 1262 - protein, 116 aa, Homo sapiens; identical to SEQ ID NO: 1226

SEQ ID NO: 1263 - protein, 122 aa, Homo sapiens; identical to SEQ ID NO: 1245

SEQ ID NO: 1264 - protein, 121 aa, Homo sapiens
QVQLVQSGTDVRKPGASVKVSCKASGYTFTDYYIHWVRQAPGQRLEWMEWFNPNTGGAHYGLDYQGRVTITTDESTSTAYMELSSLRSEDTAVYYCARVRGRNSGYESMDVWGQGTTVTVS

SEQ ID NO: 1265 - protein, 122 aa, Homo sapiens
QVQLEQSGPEVKKPGASVMVSCKASGYNFIDYYMYWVRQAPGQGPEWMGWINSNRGGTKYAQKFQGRITMTRDTAVSTAYLELNTLRSDDTAVYYCARLQSLHGLYSNADYWGQGTLVTVSS

SEQ ID NO: 1266 - protein, 122 aa, Homo sapiens
QVQLVQSGAEVKKPGASVKVSCKTSGYSFSDYHVHWVRQAPGQGLDWMGWINQNSGGATYAQKFQGRIAMTRDMSISTVFLELSSLRFDDTAIYYCARAQRPVADALELDHWGQGTRGQRLV

SEQ ID NO: 1267 - protein, 110 aa, Homo sapiens
QVQLVQSGADVKKPGASVKVSCKASGYNFITYYIHWVRQAPGQGLEWMGCINPNSGGTNYAQRFQDKVSMTRDTSISTAYMELRRLISDDTAILFCLTALDGVAYWGQGT

SEQ ID NO: 1268 - protein, 138 aa, Homo sapiens
QVQLLQSGAEVKKPGASVMVSCKASGYTFIDYYIYWVRQAPGQGPEWMGWINTNRGGTKYTQKFQGRVTLTRDTAVTTAYLELNSLRSDDTAVYYCARLQSLHGLYSNADYWGQGTLVTVSSASTNGPSVFPLGHPPP

SEQ ID NO: 1269 - protein, 138 aa, Homo sapiens
QVQLVQSGAEVKKPGASVKVSCKASGYTFTAFYLHWVRQAPGRGLEWMGWINPINGGTIYSENFEGRVILTRDTSTSTAYMELSGLRSDDSAVYFCARDAIPVTTEFDFWGQGTLVSVSQPPPRPIRSSPVGHPPPTT

SEQ ID NO: 1270 - protein, 124 aa, Homo sapiens
QVQLVQSGPEVKKPGASVKVSCKASGYTFTDYYIYWVRQTPGQGLEWMGWINPNRGGTKYAQKMQGRVSMTRDTSINTVYMELSGLTSDDTVLLLLCEITKSLMVTTPMLYFWGQGTLVTVSSR

SEQ ID NO: 1271 - protein, 122 aa, Homo sapiens
QVQLVQSGPEVKKPGASVKVSCKASGYTFTDYYIYWVRQTPGQGLEWMGWINPNRGGTKYAQKMQGRVSMTRDTSINTVYMELSGLTSDDTAFYYCARLQSLNGYYSNADFWGQGTLVTVSS

SEQ ID NO: 1272 - protein, 135 aa, Homo sapiens
QVQLVQSGAEVKKPGASVMLSCKTSGYNFIDYYIYWVRLAPGRGLQWMGWINPNRGGTKYAETFRDRLTMTRDTSVSTAYMELNNLRSDDTAVYYCARLQSLHGLYSNADYWGQGTLVTVSSASTNGPTRSFPLG

SEQ ID NO: 1273 - protein, 122 aa, Homo sapiens
QVQLVQSGAEVKKPGSSVKVSCKASGYTFTDFYIHWVRQAPWTTSVGGMVQSHWWRTLWTGLSGQSHHDRGHVHQYSLHGTAQAGIRHGHLLLCERGTLYHQLPILTSWGQGALVTVSSRLH

SEQ ID NO: 1274 - protein, 122 aa, Homo sapiens; identical to SEQ ID NO: 1271

SEQ ID NO: 1275 - protein, 130 aa, Homo sapiens
QVQLVQSGAEVKKPGASVKVSCKASRYTVTGYFIHWVRQAPGQGLEWMGWIKPNSESTNYAQKFRGRVTMTGDMSINTVYMELRRLGSDDTAVYYCASCDRRGGLATMCEGGATTLWTSWGQGTTVIVSS

SEQ ID NO: 1276 - protein, 121 aa, Homo sapiens
QVQLVQSGAEVKKPGASVRVSCKASGYTFTDYFVHWVRQTPGQNFEWMGWTNVNTGGTKYAPKFQGRVTMTRDTSNSTAYIELSGLTSDDTAVYYCTRDELFRVDDAFDLWGQGTRGHRLF

SEQ ID NO: 1277 - protein, 137 aa, Homo sapiens
QVQLVQSGAEVKKPGASVKVSCKASGYTFTDYFVHWVRQAPGQNFEWMGWTNVNTGGTKYAPKFQGRVTMTRDTSISTAYIELSGLTSDDTAVYYCTRDELFRVDDAFDMWGQGTLVTVSSASTKGPSVLPPRPPSS

SEQ ID NO: 1278 - protein, 124 aa, Homo sapiens
QVQLVQSGAEVKKPGASVKVSCKASGYTFTDYFVHWVRQAPGQNFEWMGWTNVNTGGTKYAPKFQGRVTMTRDTSISTAYIELSGLTSDDTAIYYCTRDELFRVDDAFDMWGQGTLVTVSSAST

SEQ ID NO: 1279 - protein, 140 aa, Homo sapiens
QVQLVQSGPEVKKPGASVKVSCKASGYTFTDYYIYWVRQAPGQGLEWMGWINPNRGGTKYAQKMQGRVSMTRDTSINTVYMELSGLTSDDTAFYYCARLQSLNGYYSNADFWGQGTLVTVSSASTKGPSVLPPRPPSSND

SEQ ID NO: 1280 - protein, 124 aa, Homo sapiens
QVQLVQSGAEVKKPGASVKVSCKASGYTFTDYFVHWVRQAPGQNFEWMGWTNVNTGGTKYAPKFQGRVTMTRDTSISTAYIELSGLTSDDTAVYYCTRDELFRVDDAFDMWGQGTLVTVSSAST

SEQ ID NO: 1281 - protein, 137 aa, Homo sapiens
QVQLVQSGAEVKKPGASVKVSCKASGYTFTAFYLHWVRQAPGRGLEWMGWINPINGGTIYSENFEGRVILTRDTSTSTAYMELSGLRSDDSAVYFCARDAIPVTTEFDFWGQGTLVSVSQPPPRPIGLPPRPPSSND

SEQ ID NO: 1282 - protein, 121 aa, Homo sapiens
QVQLVQSGAEVKKPGASVKVSCKASGYTFTDYFVHWVRQAPGQNFEWMGWTNVNTGGTKYAPKFQGRVTMTRDTSISTAYIELSGLTSDDTAIYYCTRDELFRVDDAFDMWGQGTLVTVSS

SEQ ID NO: 1283 - protein, 141 aa, Homo sapiens
QVQLVQSGAEVKKPGASVKVSCKASGYTLTSYGISWVRQAPGQGPEWLGWINPKSGDTNYAQKFQGRVMLTRDTSITTVHMEVNRLRSDDTAMYYCARAPFVQDSGYDWVFGHWGQGTLVTVSSGSASAPTLFPSSPLRIP

SEQ ID NO: 1284 - protein, 108 aa, Homo sapiens
QVQLVQSGADVKKPGASVKVSCKASGYNFITYYIHWVRQAPGQGLEWMGCINPNSGGTNYAQRFQDKVSMTRDTSISTAYMELRRLISDDTAIYFVSLHMVSRTWGQG

SEQ ID NO: 1285 - protein, 151 aa, Homo sapiens
QVQLVQSGAEVKKPGASVKVSCKASGYTFTDYFVHWVRQAPGQNFEWMGWTNVNTGGTKYAPKFQGRVTMTRDTSISTAYIELSGLTSDDTAVYYCTRDELFRVDDAFDMWGQGTLVTVSSASTKAHPVFPLATLLQDAPRGAQQPWAAWS

SEQ ID NO: 1286 - protein, 121 aa, Homo sapiens
QVQLVQSGAEVKKPGASVKVSCKASGYTFTDYFVHWVRQAPGQNFEWMGWTNVNTGGTKYAPKFQGRVTMTRDTSISTAYIELSGLTSDDTAVYYCTRDELFRVDDAFDMWGQGTRGDRLF

SEQ ID NO: 1287 - protein, 127 aa, Homo sapiens
QVQLVQSGAEVKKRGASVKVSCKASGNFFTGYNIHWVRQASGQGLEWMGWINPDNGATKYAQGFQGRVTMTRDTSIKTTYMELSRLTSDDTAVYYCTRAIGSGSYYNGEEKHYFLYWGQGTLVTVSS

SEQ ID NO: 1288 - protein, 127 aa, Homo sapiens
QVQLVQSGAEVKKPGASVKVSCKASGYTFTDYFVHWVRQAPGQNFEWMGWTNVNTGGTKYAPKFQGRVTMTRDTSISTAYIELSGLTSDDTAVYYCTRDELFRVDDAFDMWGQGTLVTVSSASTNGP

SEQ ID NO: 1289 - protein, 121 aa, Homo sapiens
QVQLVQFGGEVKKPGSSVKVSCKASGYTFTDYFVHWVRQAPGQNFEWMGWTNVNTGGTKYAPKFQGRVTMTRDTSISTAYIELSGLTSDDTAVYYCTRDELFRVDDAFDMWGQGTRGHRLF

SEQ ID NO: 1290 - protein, 121 aa, Homo sapiens
QVQLVQSGAEVKKPGASVKVSCKASGYTFTDFYIHWVRQAPGQRLEWVGWYNPNTGGAHSGLDFQGRVTMTGDTSISTVYMELPRLASDDTAIYYCARERMATGTAISWGRGTLVTVSSRL

SEQ ID NO: 1291 - protein, 122 aa, Homo sapiens
QVQLVQSGAEVRKPGASVKISCQTSGYTFSDYFLHWVRQAPGQGLEWMAWINPTNGDTNFAQTFQGGVTVTRDTSISTVYMELSSLKSDDTAVYFCARGVRRYSGSWYLGYWGQGTLVTVSS

SEQ ID NO: 1292 - protein, 125 aa, Homo sapiens
QVQLVQSGAEVKKPGASVKVSCKASGYTFTDYFVHWVRQAPGQNFEWMGWTNVNTGGTKYAPKFQGRVIMTRDTSISTAYIELSGLTSDDTAVYYCTRDELFRVDDAFDMWGQGTLVTVSSRLHQ

SEQ ID NO: 1293 - protein, 120 aa, Homo sapiens
QVQLVQSGAEVKKPGASVRVSCKASGYTFTDYFVHWVRQAPGQNFEWMGWTNVNTGGTKYAPKFQGRVTMTRDTSISTAYIELSGLTSDDTAIYYCTRDELFRVDDAFDMWGQGHWSPSL

SEQ ID NO: 1294 - protein, 122 aa, Homo sapiens
QVQLVQSGAEVKKPGASVKVSCKASGYTFTAYYLNWVRQAPGQGLEWVGWINPNSGVTIYAEAFEGRVTVTTDTSMKTVYMELESLTSGDTAMYFCARDATPITTEFDYWGQGTLITVSSRL

SEQ ID NO: 1295 - protein, 126 aa, Homo sapiens
QVQLVQSGPEVKKPGASVKVSCKASGYTRNTYYVHWVRQAPGQGLEWMGWINPNSGGTNYAHKFQSRVTMTRDTSISTFYMELSGLTSDDTAIYYCATDFDGGNFLYYFDSWGPGNGAHRLLSLHQ

SEQ ID NO: 1296 - protein, 120 aa, Homo sapiens
QVQLVQSGAEVKKPGASVKVSCKASGYTFTDYYIHWVRQAPGQRLEWMGWFNPNTGGAHYGLDYQGRVTMTGDTSMTTVYMELTRLASDDTAIYYCAREGLCRTTSCQFDYWGQGTLVTV

SEQ ID NO: 1297 - protein, 122 aa, Homo sapiens
QVQLVQSGAEVKKPGASVMVSCKASGYTFIDYYIYWVRQAPGQGPEWMGWINTNRGGTKYAQKFQGRATLTRDTAVTTAYLELNSLRSDDTAVYYCARLQSLHGLYSNADYWGQGTLVTVSS

SEQ ID NO: 1298 - protein, 125 aa, Homo sapiens
QVQLVQSGPEVKKPGASVMVSCKASGYTFIDYYIYWVRQAPGQGLEWMGWINPNRGGTKYAQNFQGRVTMTRDTAVSTAYMELNSVRSDDTAVYYLRDYKAFMGFTLTLTTWGQGTLGHRLLTPP

SEQ ID NO: 1299 - protein, 120 aa, Homo sapiens
QVQLVQSGAEVKKPGASVKVSCKASGYTFTDYFVHWVRQAPGQNFEWMGWTNVNTGGTKYAPKFQGRVTMTRDTSISTAYIELSGLTSDDTAIYYCTRDELFRVDDVLWWGQGTRGHRLF

SEQ ID NO: 1300 - protein, 138 aa, Homo sapiens
QVQLVQSGPEVKKPGASVMVSCKASGYTFIDYYIYWVRQAPGQGLEWMGWINPNRGGTKYAQNFQGRITMTRDTAVSTAYMELNSLRFDDTAVYYCARLQSLHGLYSNADYWGQGTLVTVSSGSASAPTLFPVSSENS

SEQ ID NO: 1301 - protein, 115 aa, Homo sapiens
QVQLVQSGAEVKKPGASVKVSCKASGYTFTDYFVHRVRQAPGQNFEWMGWTNVNTGGTNYAPRFQGRVTMTRDTSISTAYIELSGLTSDDTAVYYCTRDELFRVDDAFDMWGQGT

SEQ ID NO: 1302 - protein, 125 aa, Homo sapiens
QVQLVQSGPEVKKPGASVMVSCKASGYNFIDYYMYWVRQAPGQGPEWMGWINSNRGGTKYAQKFQGRITMTRDTAVSTAYLELNTLRSDDTAVYYCARLQSLHGLYSNADYWGQGTLVTVSSRLH

SEQ ID NO: 1303 - protein, 125 aa, Homo sapiens
QVQLVQSGAEVRKPGASVKVSCKASGYTFTDYFIHWVRQAPGQGLEWMGRINPKSGGTNYAQKFQISVTMTWDTSISTAYIEVNRLTSDDTAVYYCARGDRLAPYNSRVRYFDLWGRGTLVTVSS

SEQ ID NO: 1304 - protein, 142 aa, Homo sapiens
QVQLEQSGPEVKKPGASVMVSCKASGYNFIDYYMYWVRQAPGQGPEWMGWINSNRGGTKYAQKFQGRITMTRDTAVSTAYLELNTLRSDDTAVYYCARESIVVVVAASTYSYGMDVWGQGTTVTVSSGSASAPTLFPLVLLR

SEQ ID NO: 1305 - protein, 124 aa, Homo sapiens
QVQLVQSGAEVKKPGASVKVSCKASGYTFTDYFVHWVRQAPGQNLEWMGWTNVNTGGTNYAPKFQGRVTMTRDTSISTAYIELSGLTSDDTAVYYCTRDELFRVDDAFDMWGQGTLVTVSSAST

SEQ ID NO: 1306 - protein, 128 aa, Homo sapiens
QVQLVQSGAEVKKPGASVKVSCKASGYSFSDFYIHWVRQAPGQRLEWMGWFNPNTGGAHSGLDFQDRVTMTGDTSISTAYMELPRLASDDTAIYYCAREGHCPTTSCHFDFWGQGALVTVSSASTNGP

SEQ ID NO: 1307 - protein, 122 aa, Homo sapiens
QVQLVQSGAEVKKPGASVNVSCKASEYTFTTYYLHWVRQAPGQGLEWVGWINPKDGGTKYAQKFQGRVTMTRDTSITTAYMELSSLKSDDTAMYFCARDLGHLSSAGTYAFWGQGTLVTVSS

SEQ ID NO: 1308 - protein, 127 aa, Homo sapiens
QVQLVQSGAEVKKRGASVKVSCKASGNFFTGYNIHWVRQASGQGLEWMGWINPDNGATKYAQEFQGRVTMTRDTSIKTTYMELSRLTSDDTAVYYCTRAIGSGSYYNGEEKHYFLYWGQGTLVTVSS

SEQ ID NO: 1309 - protein, 125 aa, Homo sapiens
QVQLVQSGAEVKKPGASVRVSCKASGYTFTDYFVHWVRQAPGQNFEWMGWTNVNTGGTKYAPKFQGRVTMTRDTSNSTAYIELSGLTSDDTAVYYCTRDELFRVDDAFDLWGQGTLVTVSSASTN

SEQ ID NO: 1310 - protein, 137 aa, Homo sapiens
QVQLVQSGAEVKKPGASVKVSCKASGYTFTDYFVHWVRQAPGQNFEWMGWTNVNTGGTNYAPKFQGRVTMTRDTSISTAYIELSGLTSDDTAVYYCTRDELFRVDDAFDMWGQGTLVTVSSASTNGHRLPLGHPPPR

SEQ ID NO: 1311 - protein, 142 aa, Homo sapiens
QVQLVQSGAEVKKPGASVKVSCKASGYTFTDYFVHWVRQAPGQNFEWMGWTNVNTGGTKYAPKFQGRVTMTRDTSISTAYIELSGLTSDDTAIYYCTRDELFRVDDAFDMWGQGTLVTVSSASTNGPTPVFPLGRPASNDAP

SEQ ID NO: 1312 - protein, 147 aa, Homo sapiens
QVQLVQSGTDVRKPGASVRVSCKASGYNFTGYFIHWVRQGPGQGLEWMGWVNPNTGGAKYAQKFQGRVTMTRDTSIRTAYMELSSLKPGDTAVYYCARDPQDGTTWYTHWGQGTLVTVSSASTKGPSVFPWHPPPRAPLGAQRPWAA

SEQ ID NO: 1313 - protein, 125 aa, Homo sapiens
QVQLVQSGAEVRKPGASLRVSCKASGYIFSDYHLHWVRQAPGQGLEWMGWINHNSGGATYAQKFQGRIAMTRDTSIDTAFLELSRLRFDDTAVYYCARAQRPVADALELDHWGQGTLVSVSSAST

SEQ ID NO: 1314 - protein, 122 aa, Homo sapiens
QVQLVQSGAEVKKPGASVKVSCKASGYTFTDYFVHWVRQAPGQNFEWMGWTNVNTGGTKYAPKFQGRVTMTRDTSISTAYIELSGLTSDDTAIYYCTRDELFRVDDAFDMWGQGTLVTVSSA

SEQ ID NO: 1315 - protein, 122 aa, Homo sapiens
QVQLVQSGAEVRKPGASLRVSCKASGYIFSDYHLHWVRQAPGQGLEWMGWINHNSGGATYAQKFQGRIAMTRDTSIDTAFLELSRLRFDDTAVYYCARAQRPVADALELDHWGQGTLVSVSS

SEQ ID NO: 1316 - protein, 122 aa, Homo sapiens
QVQLVQSGTEVKKPGASVMVTCKASGYSFNDYYVNWVRQAPGQGLEWMGWINPKTGDTNYARKFQGRVSMTRDTFITTAYLELNSLTSDDTAVYYCVRGARGMPKGAFDIWGQGTLVIVSSA

SEQ ID NO: 1317 - protein, 143 aa, Homo sapiens
QVQLVQSGPEVKKPGASVMVSCKASGYTFIDYYIYWVRQAPGQGLEWMGWINPNRGGTKYAQNFQGRVTMTRDTAVSTAYMELNSVRSDDTAVYYCARLQSLHGLYSNADYWGQGTLVTVSSRLHQRAHPVLPPSATLLPTTP

SEQ ID NO: 1318 - protein, 121 aa, Homo sapiens
QVQLVQSGAEVKKPGASVKVSCKASGYTFTDYFVHWVRQAPGQNFEWMGWTNVNTVGTKYAPKFQGRVTMTRDTSISTAYIELSGLTSDDTAVYYCTRDELFRVDDAFDMWGQGTLVTVSS

SEQ ID NO: 1319 - protein, 126 aa, Homo sapiens
QVQLVQSGVEVKKPGASMKVSCKASGYNFTGYFIHWVRHGPGQGLEWMGWMNPNTGGAKYGQKFQGRVTMTRDTSIRTAYMELSSLKPGDTAVYYCARDPQDGTTWYTHWGQGTLVTVSSASTNGP

SEQ ID NO: 1320 - protein, 125 aa, Homo sapiens
QVQLVQSGAEVKKPGASVKVSCKASGYTFTDFYIHWVRQAPGQRLEWVGWYNPNTGGAHSGLDFQGRVTMTGDTSISTVYMELPRLASDDTAIYYCAREGHCSTTSCHFDFWGQGALVHRLLTPP

SEQ ID NO: 1321 - protein, 123 aa, Homo sapiens
QVQLVRSGAEMKKPGASVKVSCKTSGYTFTDYYFHWLRQAPWTRAVDGMARPHWWHKLCTKFSGQVAMTRDTSISTVYMELRRLRSDDTAVYYCVRDGGRRLGGSWYPNFDKWGPGNTYHRLL

SEQ ID NO: 1322 - protein, 126 aa, Homo sapiens
QVQLVQSGPEVKKPGASVMVSCKASGYTFIDYYIYWVRQAPGQGLEWMGWINPNRGGTKYAQNFQGRVTMTRDTAVSTAYMELNSVRSDDTAVYYCARLQSLHGLYSNADYWGQGTLAHRLLTPPP

SEQ ID NO: 1323 - protein, 158 aa, Homo sapiens
QVQLVQSGAEVRKPGASVKVSCKASGYTFTDYYIHWVRQVPGQGLEWIGWIHPNSGRATHTQKFQGRVTMTSGTSISTVYMELTGLTPDDTAVYYCARDNYRNNVWVLYTFDYWGQGTLVTVSSASTKGPSVFPLAPSSKSTSGAQQPWAAWSRTTSR

SEQ ID NO: 1324 - protein, 121 aa, Homo sapiens
QVQLVQSGAEVKKPGASVKVSCKASGYTFTDYFVHWVRQAPGQNFEWMGWTNVNTGGTNYAPKFQGRVTMTRDTSISTAYIELSGLTSDDTAVYYCTRDELFRVDDAFDMWGQGTRGHRLF

SEQ ID NO: 1325 - protein, 122 aa, Homo sapiens
QVQLVQSGPEVKKPGASVMVSCKASGYTFIDYYIYWVRQAPGQGLEWMGWINPNRGGTKYAQNFQGRVTMTRDTAVSTAYMELNSVRSDDTAVYYCARLQSLHGLYSNADYWGQGTLVTVSS

SEQ ID NO: 1326 - protein, 142 aa, Homo sapiens
QVQLVQSGPEVKKPGASVMVSCKASGYTFIDYYIYWVRLAPGQGLEWMGWINPNRGGTKYAQKFQGRITMTRDTAVSTAYMELTTLRSDDTAMYYCARLQSLHGLYSNADYWGQGTLVTVSSRPTRPLVSPRTLLHDAPRRG

SEQ ID NO: 1327 - protein, 142 aa, Homo sapiens
QVQLVQSGAEVRKPGASVKVSCKASGYTFTDYYIHWVRQVPGQGLEWIGWIHPNSGRATHTQKFQGRVTMTSGTSISTVYMELTGLTPDDTAVYYCARDNYRNNVWVLYTFDYWGQGTLVTVSSASTNGPIRSSPRPPSSND

SEQ ID NO: 1328 - protein, 124 aa, Homo sapiens
QVQLVQSGAEVKKPGASVKVSCKASGYTFTDYFVHWVRQAPGQNFEWMGWTNVNTGGTNYAPKFQGRVTMTRDTSISTAYIELSGLTSDDTAVYYCTRDELFRVDDAFDMWGQGTLVTVSSAST

SEQ ID NO: 1329 - protein, 124 aa, Homo sapiens
QVQLVQSGAEVRKPGASVKVSCKASGYTFTDYYIHWVRQVPGQGLEWIGWIHPNSGRATHTQKFQGRVTMTSGTSISTVYMELTGLTPDDTAVYYCARDNYRNNVWVLYTFDYWGQGTLVTVSS

SEQ ID NO: 1330 - protein, 142 aa, Homo sapiens
QVQLVQSGAEVRKPGASVKVSCKASGYTFTDYYIHWVRQVPGQGLEWIGWIHPNSGRATHTQKFQGRVTMTSGTSISTVYMELTGLTPDDTAVYYCARDNYRNNVWVLYTFDYWGQGTLVTVSSASTKGPSGLPPGHPPPTT

SEQ ID NO: 1331 - protein, 122 aa, Homo sapiens
QVQLVHSGAEVKKPGASVKVSCQTSGYTFSDYFLHWVRQAPGQGLEWMAWINPTNGDTNFAQTFQGRVTVTRDTSISTVYMELSSLKSDDTAVYFCARGVRRYSGSWYLGYWGQGTLVTVSS

SEQ ID NO: 1332 - protein, 122 aa, Homo sapiens
QVQLVQSGAEVKKPGASVKVSCKASGYTFIDYYIYWVRQAPGQGPEWMGWINTNRGGTKYAQKFQGRVTLTRDTAVTTAYLELNSLRSDDTAVYYCARLQSLHGLYSNADYWGQGTLVTVSS

SEQ ID NO: 1333 - protein, 116 aa, Homo sapiens
QVQLVQSGPEVKKPGASVMVSCKASGYTFIDYYIYWVRQAPGQGLEWMGWINPNRGGTKYAQNFQGRVTMTRDTAVSTAYMELNSVRSDDTAVYYCARLQSLHGLYSNADYWGQGT

SEQ ID NO: 1334 - protein, 122 aa, Homo sapiens
QVQLVQSGAEVKKPGASVMVSCKASGYTFIDYYIYWVRQAPGQGPEWMGWINTNRGGTKYAQKFQGRVTLTRDTAVTTAYLELNSLRSDDTAVYYCARLQSLHGLYSNADYWGQGTLVTVSS

SEQ ID NO: 1335 - protein, 127 aa, Homo sapiens
QVQLVQSGAEVKKPGASVKVSCKASGYTFTDYFVHWVRQAPGQNFEWMGWTQRQHWWHKLCTKVSGQGHHDQGHVHQHSLHTERPDIRHGRLYCTRDELFRVDDAFDMWGQGTLVTVSSASTKAHRS

SEQ ID NO: 1336 - protein, 125 aa, Homo sapiens
QVQLVQSGAEVKKPGASVKVSCKASGYTFSAYYLHWVRQAPGQGLEWMGCINPNSGATIYAPKFQGRVTLTTDTPISTTFMEMSGLTYGDTAVYYCSRDYAEILTDYYIVDYWGQGTLVTISSRL

SEQ ID NO: 1337 - protein, 125 aa, Homo sapiens
QVQLVQSGAEVKKPGASVKVSCKASGDIFSDYGVHWVRQAPGQGLEWMGWINHNSGGATYAQKFHGRVAMTRDTSISMAFMELSRLRFDDTAVYYCARAQRPVADALELDSWGQGTLVSVSSRLH

SEQ ID NO: 1338 - protein, 164 aa, Homo sapiens
QVQLVQSGAEVKKPGASVKVSCKASGYTFTDYFVHWVRQVPGQNFEWMGWTNVNTGGTNYAPKFQGRVTMTRDTSISTAYIELSGLTSDDTAVYYCTRDELFRVDDAFDMWGQGTLVTVSSASTKGPSAFPLAPSSKTHLWGTAALGCLVKDYFPEPVTVSWNS

SEQ ID NO: 1339 - protein, 128 aa, Homo sapiens
QVQLVQSGAEVKKPGASVMVSCKASGYTFIDYYIYWVRQAPGQGPEWMGWINTNRGGTKYAQKFQGRVTLTRDTAVTTAYLELNSLRSDDTAVYYCARLQSLHGLYSNADYWGQGRWSPSPQPPPTGP

SEQ ID NO: 1340 - protein, 129 aa, Homo sapiens
QVQLVQSGAEVKKPGASVKVSCQTSGYTSTGHYTHWVRQAPGQRPEWMGWMNPNSGGTTFAPKFQGRITMTRDTSTSTAYLEVRGLRADDTAVYYCARDYCSGGFCHYFFDSWGQGTLVTVSSASTNGP

SEQ ID NO: 1341 - protein, 122 aa, Homo sapiens
QVQLVQSGPEVKKPGASVMVSCKASGYTFIDYYIYWVRLAPGQGLEWMGWINPNRGGTKYAQKFQGRITMTRDTAVSTAYMELTTLRSDDTAMYYCARLQSLHGLYSNADYWGQGTLVTVSS

SEQ ID NO: 1342 - protein, 124 aa, Homo sapiens
QVQLVQSGAEVKKPGASVKVSCKASGYTFTDYFVHWVRQAPGQNFEWMGWTNVNTGGTKYAPKFQGRVTMTRDTSISTAHIELSGLTSDDTAVYYCTRDELFRVDDAFDMWGQGTLVTVSSAST

SEQ ID NO: 1343 - protein, 121 aa, Homo sapiens
QVQLVQSGADVKKPGASVKVSCKASGYTFTDYFVHWVRQVPGQNFEWMGWTNVNTGGTNYAPKFQGRVTMTRDTSISTAYIELSGLTSDDTAVYYCTRDELFRVDDAFDMWGQGTLVTVSS

SEQ ID NO: 1344 - protein, 141 aa, Homo sapiens
QVQLVQSGAEVKKPGASVKVSCKASGLTFIGYYMHWVRQAPGQGLEWMGWINPNNGNTNYAQKFRGRVTMARDTSISTAYMELRGLKFDDTSIYCCAISADFSGVSDYYYMGVWGKGTTVTVSSGVHPPNPFPSSSSRRIP

SEQ ID NO: 1345 - protein, 155 aa, Homo sapiens
QVQLVQSGAEVKKPGASVKVSCQTSGYTSTGHYTHWVRQAPGQRPEWMGWMNPNSGGTTFAPKFQGRITMTRDTSTSTAYLELRGLRADDTAVYYCARDYCSGGFCHYFFDSWGQGTLVTVSSASTKGPSVFPLAPSSNEHLWGTAALAAWSGLL

SEQ ID NO: 1346 - protein, 112 aa, Homo sapiens
QVQLVQSGAEVKKPGASMKVSCKASGYTFNDYYIQWVRQAPGQGLEWMGCINPQSDDTKYAQKFQGRVTMTRDTSTNTAYMELSGLTFDDTAMYYCLTAIDGIVYWGQGPLV

SEQ ID NO: 1347 - protein, 124 aa, Homo sapiens
QVQLVQSGAEVKKPGASVKVSCKASGYAFTDYFVHWVRQAPGQNFEWMGWTNVNTGGTKYAPKFQGRVTMTRDTSISTAYIELSGLTSDDTAVYYCTRDELFRVDDAFDMWGQGTLVTVSSAST

SEQ ID NO: 1348 - protein, 133 aa, Homo sapiens
QVQLVQSGAEVKKPGASVKVSCQTSGYTSTGHYTHWVRQAPGQRPEWMGWMNPNSGGTTFAPKFQGRITMTRDTSTSTAYLEVRGLRADDTAVYYCARDYCSGGFCHYFFDSWGQGTLVTISSASTKAHRSSP

SEQ ID NO: 1349 - protein, 125 aa, Homo sapiens
QVQLVQSGAEVKKPGASVMVSCKASGYTFIDYYIYWVRQAPGQGPEWMGWINTNRGGTKYAQKFQGRVTLTRDTAVTTAYLELNSLRSDDTAVYYCARLQSLHGLYSNADYWGQGTLVTVSSAST

SEQ ID NO: 1350 - protein, 128 aa, Homo sapiens
QVQLVQSGAEVKKPGASVKVSCKASGYTFTTYYIHWVRQAPGQGLEWVGWFNPNSGGAHYGLDYQGRVTMTGDTSMTTVYMELTRLASDDTAIYYCAREGLCRTTSCQFDYWGQGTLVTVFSASTNGP

SEQ ID NO: 1351 - protein, 120 aa, Homo sapiens
QVQLVQSGVEVKKPGASMKVSCKASGYNFTGYFIHWVRQGPGQGLEWMGWMNPNTGGAKYAQKFQGRVTMTRDTSIRTAYMELSSLKTRRHGRLYCARDPQDGTTWYTHWGQGTLVTVSS

SEQ ID NO: 1352 - protein, 124 aa, Homo sapiens
QVQLVQSGAEVKKPGASVKVSCKASGYSFTGYYIHWLRQTPGQGPEWMGWINPNTGGANYAPNFEGRVTMTRDTSTKTAYMELSRLRSDDTAFYYCAEGGVLLRGYYCFLLISWGPGNAGDRLL

SEQ ID NO: 1353 - protein, 125 aa, Homo sapiens
QVQLVQSGAEVKKPGASVKVSCKASGYRFIDYYIHWVRQAPGQGLDYMGWINPKSGDTNYVTKFQGRVTMTRDTSISTGYMEMTGLISDDTAVYYCAKTGGKYADYLDIDYWGQGTLVTVSSTST

SEQ ID NO: 1354 - protein, 138 aa, Homo sapiens
QVQLVQSGAEVKKPGASVKVSCKASGYTFTDYFVHWVRQAPGQNFEWMGWTNVNTGGTNYAPKFQGRVTMTRDTSISTAYIELSGLTSDDTAVYYCTRDELFRVDDAFDMWGQGTLVTVSSASTKAHRSSPWPPSSND

SEQ ID NO: 1355 - protein, 123 aa, Homo sapiens
QVQLVQSGVEVKKPGASMKVSCKASGYNFTGYFIHWVRQGPGQGLEWMGWMNPNTGGAKYAQKFQGRVTMTRDTSIRTAYMELSSLKPGDTAVYHCARDPQDGTTWYTHWGQGHWSPSPQPPP

SEQ ID NO: 1356 - protein, 141 aa, Homo sapiens
QVQLVQSGAEVKKPGASVKVSCQASGYTFTDYYIHWVRQAPGQGLEWMGWINPNSGGTNYAQKFQGRLTITTDEYTNTAYMELSSLRSEDTAVYYCARAQDSGSGNLINWFDPWGQGTLVTVSSGSASAPTLFPSSPLRIP

SEQ ID NO: 1357 - protein, 122 aa, Homo sapiens
QVQLVQSGAEVRKPGASVKVSCKASGYSFSDFYIHWVRQAPGQRLEWMGWFNPNTGGAHSGLDFQDRVTMTGDTSISTAYMELPRLVSDDTAIYYCAREGHCPTTSCHFDFWGQGALVTVSS

SEQ ID NO: 1358 - protein, 124 aa, Homo sapiens
QVQLVQSGAEVKKPGASVKVSCKASGYTFTDYFVHWVRQAPGQNFEWMGWTNVNTGGTNYAPKFQGRVTMTRDTSISTAYIELSGLTSDDTAVYYCTRDELFRVDDAFDMWGQGTRGHRLFTPP

SEQ ID NO: 1359 - protein, 163 aa, Homo sapiens
QVQLVQSGAEVKKPGASVKVSCKASGYTFTDYFVHWVRQAPGQNFEWMGWTNVNTGGTKYAPKFQGRVTMTRDTSISTAYIELSGLTSDDTAVYYCTRDELFRVDDAFDMWGQGTLVTVSSASTKAHRSSPWHPPPRAPLGHSSPGLPGQGLLPEPVTVSWNS

SEQ ID NO: 1360 - protein, 121 aa, Homo sapiens
QVQLVQSGAEVKKPGASVKVSCKASGYTFTDYFVHWVRQAPGQNFEWMGWTNVNTGGTKYAPKFQGRVTMTRDTSISTAYIELSGLTSDDTAVYYCTRDELFRVDDAFDMWGQGTLVTVSS

SEQ ID NO: 1361 - protein, 118 aa, Homo sapiens
QVQLVQSGAEMKKPGASVKVSCRASGYRFNDYYMHWLRQAPGQGPEWMGWINPKQWWHKIMHRGLRAGSPPGTGPSTQPTWTTGYLTTRPFTTVREDFSAVRGDIPSTLTSWGQGTLV

SEQ ID NO: 1362 - protein, 124 aa, Homo sapiens
QVQLVQSGAEVKKPGASVKVSCKASGLTFIGYYMHWVRQAPGQGLEWMGWINPNNGNTNYAQKFRGRVTMARDTSISTAYMELRGLKFDDTSIYYCAISADFSGVSDYYYMGVWGKGTAVTVSS

SEQ ID NO: 1363 - protein, 121 aa, Homo sapiens
QVQLVQSGAEVKKPGASVKVSCKASGYTFTDYFVHWVRQAPGQNFEWMGWTNVNTGGTNYAPKFQGRVTMTRDTSISTAYIELSGLTSDDTAVYYCTRDELFRVDDAFDMWGQGTLVTVSS

SEQ ID NO: 1364 - protein, 137 aa, Homo sapiens
QVQLVQSGAEVKKPGASVRVSCKASGYTFTDYFVHWVRQAPGQNFEWMGWTNVNTGGTKYAPKFQGRVTMTRDTSNSTAYIELSGLTSDDTAVYYCARDPQEGSSWYTHWGQGTLVTVSSASTNGPIGLPPWPPSSN

SEQ ID NO: 1365 - protein, 133 aa, Homo sapiens
QVQLVHSGAEVKKPGASVKVSCQTSGYTFSDYFLHWVRQAPGQGLEWMAWINPTNGDTNFAQTFQGRVTVTRDTSISTVYMELSSLKSDDTAVYFCARGVRRYSGSWYLGYWGQGTLVTVSSASTKGPSGLPP

SEQ ID NO: 1366 - protein, 122 aa, Homo sapiens
QVQLVQSGAEVKKPGASVKVSCKASGYSFSDYHLHWVRQAPGQGLEWMGWINHNGGGATYAQKFQGRVAMTRDTSISTVFMELSRLRFDDTAVYYCASSVGADFCFDYWGQGTLVTGLLREC

SEQ ID NO: 1367 - protein, 149 aa, Homo sapiens
QVQLVQSGAEVKKPGASVKVSCKASGYTFTDYFVHWVRQAPGQNFEWMGWTNVNTGGTKYAPKFQGRVTMTRDTSISTAYIELSGLTSDDTAVYYCTRDELFRVDDAFDMWGQGTLVTVSSASTNGPSGLPPGRPASTDATSDEPRRRP

SEQ ID NO: 1368 - protein, 121 aa, Homo sapiens; identical to SEQ ID NO: 1360

SEQ ID NO: 1369 - protein, 118 aa, Homo sapiens
QVQLVHSGAEVKKPGASVKVSCQTSGYTFSDYFLHWVRQAPGQGLEWMAWINPTNGDTNFAQTFQGRVTVTRDTSISTVYMELSSLKSDDTAVYFCARGVRRYSGSWYLGYWGQGTLV

SEQ ID NO: 1370 - protein, 125 aa, Homo sapiens
QVQLVHSGAEVKKPGASVKVSCQTSGYTFSDYFLHWVRQAPGQGLEWMAWINPTNGDTNFAQTFQGRVTVTRDTSISTVYMELSSLKSDDTAVYFCARGVRRYSGSWYLGYWGQGTLVTVSSAST

SEQ ID NO: 1371 - protein, 115 aa, Homo sapiens
QVQLVQSGAEVKKPGASVMVSCKASGYTFIDYYIYWVRQAPGEGLEWMGWINPNRGGNKVCTEVSGPGHHDQGHGRQHGLYGTEQPEIRHGRLLLCETSEPWVFTLTLTTWGQGT

SEQ ID NO: 1372 - protein, 136 aa, Homo sapiens
QVQLVQSGAEVKKPGASVKVSCKASGYTFTDYFVHWVRQAPGQNFEWMGWTQRQHWWHKLCTKVSGQGHHDQGHVHQHSLHTERPDIRHGRLYCARGDYDYLWGNYRFEYWGQGTLVTVSSASTKGPSVFPLAPSS

SEQ ID NO: 1373 - protein, 122 aa, Homo sapiens
QVQLVQSGAEVKKPGASVKVSCKASGYRFIDYYIHWVRQAPGQGLDYMGWINPKSGDTNYVTKFQGRVTMTRDTSISTGYMEMTGLISDDTAVYYCAKTGGKYADYLDIDYWGQGTLVTVSS

SEQ ID NO: 1374 - protein, 125 aa, Homo sapiens; identical to SEQ ID NO: 1353

SEQ ID NO: 1375 - protein, 124 aa, Homo sapiens; identical to SEQ ID NO: 1328

SEQ ID NO: 1376 - protein, 122 aa, Homo sapiens; identical to SEQ ID NO: 1373

SEQ ID NO: 1377 - protein, 124 aa, Homo sapiens; identical to SEQ ID NO: 1280

SEQ ID NO: 1378 - protein, 126 aa, Homo sapiens
QVQLVQSGAEVKKPGASVKVSCKASGYRFIDYYIHWVRQAPGQGLDYMGWINPKSGDTNYVTKFQGRVTMTRDTSISTGYMEMTGLISDDTAVYYCAKTGGKYADYLDIDYWGQGTLVTVSSTSTN

SEQ ID NO: 1379 - protein, 121 aa, Homo sapiens
QVQLVQSGAEVKKPGASVKVSCKASGYTFTDYFVHWVRQAPGQNFEWMGWTNVNTGGTKYAPKFQGRVTMTRDTSISTAYIELSGLTSDDTAVYYCTRDELFRVDDAFDMWGQGTRGHRLF

SEQ ID NO: 1380 - protein, 121 aa, Homo sapiens; identical to SEQ ID NO: 1360

SEQ ID NO: 1381 - protein, 127 aa, Homo sapiens
QVQLVQSGAEVRKPGASVKVSCKASGYIFTGHYMNWVREAPGQGLEWMGWINPDSGGTKYAEQFQGRVTTTRDTSINTVYMELSSLRSDDTAIYYCARLFVVVPVYFFRNNCLLISWGQGTTVTVSS

SEQ ID NO: 1382 - protein, 138 aa, Homo sapiens
QVQLVQSGAEVKKPGASVKVSCKASGYTFTDYFVHWVRQAPGQNFEWMGWTNVNTGGTKYAPKFQGRVTMTRDTSISTAYIELSGLTSDDTAVYYCTRDELFRVDDAFDMWGQGTLVTVSSGSASAPTLFPSSPLRIP

SEQ ID NO: 1383 - protein, 140 aa, Homo sapiens
QVQLVQSGAEVKKPGASVKVSCKASGYTFTDYFVHWVRQAPGQNFEWMGWTNVNTGGTKYAPKFQGRVTMTRDTSISTAYIELSGLTSDDTAVYYCTRDELFRVDDAFDMWGQGTLVTVSSASTNGPIGPSPVGHPPPTT

SEQ ID NO: 1384 - protein, 121 aa, Homo sapiens
QVQLLQSGAEVKKPGASVMVSCKASGYTFIDYYIYWVRQAPGQGLEWMGWINPNRGGTKYAQKFQGRVTLTRDTAVTTAYLEVNSLRSDDTAVYYCARLQSLHGFYSNADYWGQGRWSPSP

SEQ ID NO: 1385 - protein, 138 aa, Homo sapiens
QVQLVQSGAEVKKPGASVKVSCKASGYSFSDYHIHWVRQAPGQGLEWMGWINQNGGGATHVQKFQGRVAMTRDTSISTAFMELSRLRFDDTAIYYCARALRPVADALELDYWGRGNAGHRLVTPPPTGPVRSFPRRPP

SEQ ID NO: 1386 - protein, 138 aa, Homo sapiens
QVQLVQSGAEVKKPGASVKVSCKASGYTFTSYGISWVRQAPGQGLEWMGWINPNNDGTTYAHKFQGRVTVTRDTSISTAYMELSGLRSDDTAIYYCARAPYSALYFYMDVWGKGTTVTVSSGSASAPTLFPSSPLRIP

SEQ ID NO: 1387 - protein, 123 aa, Homo sapiens
QVQLVQSGAEVKKPGASVKVSCKASGYTFSAYYLHWVRQAPGQGLEWMGCINPNSGATIYAPKFQGRVTLTTDTSISTTFMEMSGLTYGDTAVYYCSRDHAEILTDYYIVDYWGQGTLVTVSS

SEQ ID NO: 1388 - protein, 133 aa, Homo sapiens
QVQLVQSGVEVKKPGASMKVSCKASGYNFTGYFIHWVRQGPGQGLEWMGWMNPNTGGAKYAQKFQGRVTMTRDTSIRTAYMELSSLKPGDTAVYYCARDPQDGTTWYTHWGQGTLVTVSSASTKGPSGPSPVA

SEQ ID NO: 1389 - protein, 127 aa, Homo sapiens
QVQLVQSGAEVKKPGASVKVSCKASGYSFSDYHIHWVRQAPGQGLEWMGWINQNGGGATHVQKFQGRVAMTRDTSISTAFMELSRLRFDDTAIYYCARALRPVADALELDYWGQGTLVTVSSGSASA

SEQ ID NO: 1390 - protein, 122 aa, Homo sapiens
QVQLVQSGAEVKKPGASVKVSCKASGYSFSDYHIHWVRQAPGQGLEWMGWINQNGGGATHVQKFQGRVAMTRDTSISTAFMELSRLRFDDTAIYYCARALRPVADALELDYWGQGTLVTVSS

SEQ ID NO: 1391 - protein, 121 aa, Homo sapiens
QVQLLQSGAEVKKPGASVMVSCKASGYTFIDYYIYWVRQAPGQGLEWMGWINPNRGGTKYAQKFQGRVTLTRDTAVTTAYLEVNSLRSDDTAVYYCARLQSLHGFYNADYWGQGTLVTVSS

SEQ ID NO: 1392 - protein, 128 aa, Homo sapiens
QVQLVQSGVEVKKPGASMKVSCKASGYNFTGYFIHWVRQGPGQGLEWMGWMNPNTGGAKYAQKFQGRVTMTRDTSIRTAYMELSSLKPGDTAVYYCARDPQDGTTWYTHWGQGTLVTVSSASTKAHRS

SEQ ID NO: 1393 - protein, 138 aa, Homo sapiens
QVQLVQSGAEVKKPGASVKVSCKISGYTFTKFYIHWVRQAPGQGLEWLGWINPNNGGTKSAQQFQGRVALTRDTSLSTAYIELSSLTSDDTAVYYCARGDYDYLWGNYRFEYWGQGTLVTVSSASTKAHRSSPWPPSL

SEQ ID NO: 1394 - protein, 141 aa, Homo sapiens
QVQLVQSGAEVKKPGASVKVSCKTSGYTFTDNYIHWVRQAPGQGLEWMGWINPNSGGSKSPQKFQGRVTMTRDTSVSTVYLELTRLKFDDTAIYYCTKDYGIVGSTLPEYFQHWGQGTLVTVSSRLHQRPIRSSPSATLLQ

SEQ ID NO: 1395 - protein, 142 aa, Homo sapiens
QVQLVQSGVEVKKPGASMKVSCKASGYNFTGYFIHWVRQGPGQGLEWMGWMNPNTGGAKYAQKFQGRVTMTRDTSIRTAYMELSSLKPGDTAVYYCARDPQDGTTWYTHWGQGTLVTVSSASTKGPSGPSPVAALPPRTPPP

SEQ ID NO: 1396 - protein, 122 aa, Homo sapiens; identical to SEQ ID NO: 1390

SEQ ID NO: 1397 - protein, 134 aa, Homo sapiens
QVQLVQSGVEVKKPGASMKVSCKASGYNFTGYFIHWVRQGPGQGLEWMGWMNPNTGGAKYAQKFQGRVTMTRDTSIRTAYMELSSLKPGDTAVYYCARDPQDGTTWYTHWGQGTLVTVSSASTKGPSGLPPGRP

SEQ ID NO: 1398 - protein, 123 aa, Homo sapiens
QVQLVQSGAEVKKPGASVKVSCKASGYSFSDYHIHWVRQAPGQGLEWMGWINQNGGGATHVQKFQGRVAMTRDTSISTAFMELSRLRFDDTAIYYCARALRPVADALELDYWGQGTLVTVSSA

SEQ ID NO: 1399 - protein, 130 aa, Homo sapiens
QVQLVQSGAEVKKPGASVKVSCKASGYIFNNYFLHWVRQAPGQGLEWMGWINPNTAGTNYAYNFRGRVSMTRDTSTGTAYMELSRLRSDDTAVYFCASCERGVVGVTTLGTGGYVRQWTSWGQGTHGRRL

SEQ ID NO: 1400 - protein, 122 aa, Homo sapiens
QVQLVQSGAEVKKPGASVKVSCKASGYSFSDYHIHWVRQAPGQGLEWMGWINQNGGGATHVQKFQGRVAMTRDTSISTAFMELSRLRFDDTAIYYCARALRPVADALELDYWGRGNAGHRLV

SEQ ID NO: 1401 - protein, 121 aa, Homo sapiens; identical to SEQ ID NO: 1391

SEQ ID NO: 1402 - protein, 136 aa, Homo sapiens
QVQLVQSGAEVKKPGASVKVSCKASGYTFTGYYMHWVRQAPGQGLEWMGWINPNSGGTNYAQKFQGRVTISTDESTATVYMELSSLRFEDTAIYYCARDRFYGSGSYVYWGQGTLVTVSSGSASAPTLSPRLLEFP

SEQ ID NO: 1403 - protein, 121 aa, Homo sapiens
QVQLVQSGVEVKKPGASMKVSCKASGYNFTGYFIHWVRQGPGQGLEWMGWMNPNTGGAKYAQKFQGRVTMTRDTSIRTAYMELSSLKPGDTAVYYCARDPQDGTTWYTHWGQGTPVTVSSR

SEQ ID NO: 1404 - protein, 122 aa, Homo sapiens
QVQLVQSGAEAKKPGVSVKVSCKTSGYIFTGFYIHWVRQAPGQGLEWMGWINPKTGGANYAQKFQGRVTMTRDMPIRTIFMELSSLGSDDTAVYYCAREGGRLLVVRELQYWGQGTLVTVSS

SEQ ID NO: 1405 - protein, 125 aa, Homo sapiens
QVQLVQSGAEVKKPGASVKVSCKTSGYTFTDNYIHWVRQAPGQGLEWMGWINPNSGGSKSPQKFQGRVTMTRDTSVSTVYLELTRLKFDDTAIYYCTKDYGIVGSTLPEYFQHWGQGTLVTVSSA

SEQ ID NO: 1406 - protein, 125 aa, Homo sapiens
QVQLVQSGAEVKKPGASVKVSCKASGYTFTGYYMHWVRQAPGQGLEWMGWINPNSGGTNYAQKFQGRLTITADESTNTGYMELDNLRSDDTAIYYCARGRTVHPFEYYYYYMDVWGKGTTVTVTS

SEQ ID NO: 1407 - protein, 122 aa, Homo sapiens
QVQLVQSGAEVKKPGASVKVSCQASGYTFTDYYIHWLRQAPGQGLEWMGWINPNSGGAHYGLDYQGRVTMTGDTSITTVYMELTRLASDDTAIYYCAREGLCGTTSCQFDFWGQGTLVTVFS

SEQ ID NO: 1408 - protein, 123 aa, Homo sapiens
QVQLVQSGAEVKKPGASVKVSCKASGYSFSDYHIHWVRQAPGQGLEWMGWINQNGGGATHVQKFQGRVAMTRDTSISTAFMELSRLRFDDTAIYYCARALRPVADALELDYWGQGTLVTVSSG

SEQ ID NO: 1409 - protein, 124 aa, Homo sapiens
QVQLVQSGAEVKKPGASVKVSCKASGYTFTDYFVHWVRQAPGQNFEWMGWTNVNTGGTKYAPKFQGRVTMTRDTSISTAYIELSGLTSDDTAVYYCTRDELFRVDDAFDMWGQGTRGHRLFSLH

SEQ ID NO: 1410 - protein, 161 aa, Homo sapiens
QVQLVQSGVEVKKPGASMKVSCKASGYNFTGYFIHWVRQGPGQGLEWMGWMNPNTGGAKYAQKFQGRVTMTRDTSIRTAYMELSSLKPGDTAVYYCARDPQDGTTWYTHWGQGTLVTVSSASPRAHPVFPLAALPPGRTSETHSRPWAAWSRTTFPNRRCR

SEQ ID NO: 1411 - protein, 126 aa, Homo sapiens
QVQLVQSGSEVKKPGASVKVSCKASGYTFTTYYIHWVRQAPGQGLEWVGWFNPNSGGAHFGLDFQGRVTMTGDTSISTVYMDLTSLASVDTAIYYCAREGRCPTTSCHFDYWGQGTLVTVSSRLHQ

SEQ ID NO: 1412 - protein, 144 aa, Homo sapiens
QVQLVQSGVEVKKPGASMKVSCKASGYNFTGYFIHWVRQGPGQGLEWMGWMNPNTGGAKYAQKFQGRVTMTRDTSIRTAYMELSSLKPGDTAVYYCARDPQDGTTWYTHWGQGTLVTVSSRLHQGPIGPSPVAALPPRTPPPRR

SEQ ID NO: 1413 - protein, 123 aa, Homo sapiens
QVQLVQSGAEVKKPGSSVKVSCKASGYTFSAYYLHWVRQAPGQGLEWMGCINPNSGATIYAPKFQGRVTLTTDTSISTTFMEMSGLTYGDTAVYYCARNTDSVATSLYSLGVWGQGTTVTVSS

SEQ ID NO: 1414 - protein, 124 aa, Homo sapiens
QVQLVQSGAEVKKPGASVKVSCKTSGYSFTGNYIHWVRQAPGQGLEWMGWINPNSGGSKSPQKFQGRVTMTRDTSVSTVYLELTRLKFDDTAIYYCTKDYGIVGSTLPEYFQHWGQGTLVTVSS

SEQ ID NO: 1415 - protein, 137 aa, Homo sapiens
QVQLVQSGAEVKKPGASVKVSCKASRYTVTGYFIHWVRQAPGQGLEWMGWIKPNSESTNYAQKFQGRVTITADESTSTAYMELSSLRSEDTAVYYCASSRAAGGYYYYYMDVWGKGTTVTVSSGSASAPTLFPLVSS

SEQ ID NO: 1416 - protein, 135 aa, Homo sapiens
QVQLVQSGAAVKKPGSSVKVSCKASGGVFTKYDINWVRQGPWTRAVDGMDQPQWWHKLCTEISGAGSPPGTRPSPQPTWSAGHLTTRPYITVRACIVPRPLPCRGFDWGQGTLVTVSSGSASAPTLFPLVSSENS

SEQ ID NO: 1417 - protein, 118 aa, Homo sapiens
QVQLVQSGAEVKNLGASVKVSCKVSGHTLTDLSLHWVRQAPGKGLEWMGGFDPEDEETIYAQEFQGRIIMTEDTSTDTAYMELSSLRSHDTAVYYCAVSAYDTSLDYWGQGTLVTVSS

SEQ ID NO: 1418 - protein, 124 aa, Homo sapiens
QVQLVQSGAEVKKPGASVKVSCKTSGYSFTGNYIHWVRQAPGQGLEWMGWINPNSGGSKSPQKFQGRVTMTRDTSVSTVYLELTRLKFDDTAIYYCTKDYGMLGSTLPEYFQHWGQGTVVTVSS

SEQ ID NO: 1419 - protein, 114 aa, Homo sapiens
QVQLVQSGAEVKKPGASVKVSCKVSGYFLSKLSMHWVRQAPGKGLEWMGGFNPGEGETIYAQRFQGRVTITEDISTDTAYMELSSLRSEDTAVYFCATGITVVSVYLDYWGQGT

SEQ ID NO: 1420 - protein, 153 aa, Homo sapiens
QVQLVQSGAEMKKPGASVKVSCKTSGYTFTDYYFHWLRQAPGQGLEWMGWLVPNTGGTNYALNFQGRVAMTRDTSISTVYMELRRLRSDDTAVYYCVRDGGRRLGGSWYPNFDKWGQGTLITVSSASTKAHRSSPWHPPPRAPLGHSALGCLV

SEQ ID NO: 1421 - protein, 122 aa, Homo sapiens
QVQLVQSGAEVKKPGASVMVSCKASGYTFIDYYIYWVRQAPGRGLEWMGWINPNRGGTKYAQKFRDRVTMTRDTAVSTAYMELNSLRSDDTAVYYCARLQSLSGLYSNADYWGQGTLVTVSS

SEQ ID NO: 1422 - protein, 127 aa, Homo sapiens
QVQLVQSGAEVKKPGASVKVSCKASGYTFIDFYIHWVRQAPGQRLEWMGWFNPNTGGAHSGLDFQGRVTMTGDTSISTAYMELPRLASDDTAIYYCAREGHCRTTSCHFGFWGQGALVTVSSASTKA

SEQ ID NO: 1423 - protein, 123 aa, Homo sapiens
QVQLVQSGAEVKKPGASVKVSCKASGYTFSGYYYIHWVRQAPGQGLEWMGRINPNTGGTDYAQKFQGRVTMTRDTSMNTLYLELSRLTSDDTAVYYCATIQRLVKDLDYWGQGTLVTVSSAST

SEQ ID NO: 1424 - protein, 118 aa, Homo sapiens
QVQLVQSGVEVKKPGASVKVSCKVSGYFLSKISIHWVRQAPEKGLEWMGGFDAEQGETVYAQKFQGRVTVTEDTSTDTAYMDVSSLRSEDTAVYYCATGIRGRPLISWGQGTVVTVSS

SEQ ID NO: 1425 - protein, 124 aa, Homo sapiens
QVQLVQSGPEVKKPGASVKVSCKASGYTYNTYYMHWVRQAPGQGLEWMGWINPNSGGTNYAQRFQTRVDMTRGTSINTVYMELSGLTSDDTAVYYCVTDFNGGSSFSFYYFPTWGQGTRGHRLL

SEQ ID NO: 1426 - protein, 128 aa, Homo sapiens
QVQLVQSGAEVKKPGASVMVSCKASGYTFIDYYIYWVRQAPGRGLEWMGWINPNRGGTKYAQKFRDRVTMTRDTAVSTAYMELNSLRSDDTAVYYCARLQSLSGLYSNADYWGQGTLVTVSSRLHQRA

SEQ ID NO: 1427 - protein, 121 aa, Homo sapiens
QVQLVQSGAEVKKPGASVKVSCKISGYTFTKFYIHWVRQAPGQGLEWLGWINPNNGGTKSAQQFQGRVALTRDTSLSTAYIELSSLTSDDTAVYYCARGDYDYLWGNYRFEYWGQGTLVTV

SEQ ID NO: 1428 - protein, 126 aa, Homo sapiens
QVQLVQSGAEVKKPGASVKVSCQTSGYTSTGHYTHWVRQAPGQRPEWMGWMNPNSGGTTFAPKFQGRVTITRNTSISTAYMELSSLRSEDTAVYYCARGKWEQLGAFDIWGQGTMVTVSSGSASAP

SEQ ID NO: 1429 - protein, 124 aa, Homo sapiens
QVQLVQSGAEVKKPGASVKVSCQASGYTFTDYYIHWLRQAPGQGLEWMGWMNPNSGGTTFAPKFQGRITMTRDTSTSTAYLEVRGLRADDTAVYYCARDYCSGVSATTSLTPWGQGTLVHRLLT

SEQ ID NO: 1430 - protein, 124 aa, Homo sapiens
QVQLVQSGPEVKKPGASVKVSCKASGYTYNTYYMHWVRQAPGQGLEWMGWINPNSGGTNYAQRFQTRVDMTRDTSINTVYMELSGLTSDDTAVYYCVTDFNGGSSFPFTTLTTWGQGTLVTVSS

SEQ ID NO: 1431 - protein, 125 aa, Homo sapiens
QVQLVQSGAEVKKPGASVKVSCKASGYTFTDYFVHWVRQAPGQNFEWMGWTNVNTGGTKYAPKFQGRVTMTRDTSISTAYIELSGLTSDDTAVYYCARDMSSSWTNWYFDLWGPGTWSLSPQPPP

SEQ ID NO: 1432 - protein, 125 aa, Homo sapiens
QVQLVQSGAEVKKPGASVKVSCKASGYTYINYFMQWVRQAPGQGLEWMGWINPNSGLTNYAQKFRGRVTMARDTSINTAYMELRGLRIRHGRLLLYFLRPGWIVTIYKGGATYGMDVWGQGTTVT

SEQ ID NO: 1433 - protein, 128 aa, Homo sapiens
QVQLVQSGAEVKKPGASVKVSCETSGYTFSGFYLHWVRQAPGQGLEWVGWINPYSGGTDYAQKFQGRVTMTLDTSISTAYMELDGLRSDDTAILLLCERISTPIPRNSISLGRRFDPWGQGTLVIVSS

SEQ ID NO: 1434 - protein, 122 aa, Homo sapiens
QVQLVQSGAEVKKPGASVKVSCKASGYTFTDFYIRWVRQAPGQRLEWMGWFNPNTGGAHSGLDFQGRVTMTGDTSISTAYMELPRLASDDTAIYYCAREGHCRTTSCHFDFWGQGALVTVSS

SEQ ID NO: 1435 - protein, 121 aa, Homo sapiens
QVQLVQSGAEVRKPGASVRVSCKTSGYTFTGYYIHWVRQAPGQGLEWMGWINPDTGATKYSQKSQGRVSMTRDTSISTAYMELNRLMSDDTAFYYCARRPQDGSSWYTHWGQGTLVTVSTR

SEQ ID NO: 1436 - protein, 122 aa, Homo sapiens
QVQLVQSGAEVKKPGASVKVSCKASGYTFIDYYIYWVRQAPGQGLEWMGWINPNRGGTKYAQKFQGRVTLTRDTAVTTAYLEVNSLRSDDTAVYYCARLQSLHGFYSNADYWGQGTLVTVSS

SEQ ID NO: 1437 - protein, 122 aa, Homo sapiens
QVQLVQSGAEVKKPGSSVKVSCKASGYTFIDYYIYWVRQAPGQGLEWMGWINPNRGGTKYAQKFQGRVTLTRDTAVTTAYLEVNSLRSDDTAVYYCARLQSLHGFYSNADYWGQGTLVTVSS

SEQ ID NO: 1438 - protein, 138 aa, Homo sapiens
QVQLVQSGPEVRKPGASVKVSCEASGYTFTGYYIHWVRQAPGQGLEWMGWINPNNDGTTYAHKFQGRVTVTRDTSISTAYMELSGLRSDDTAIYYCARAPYSALYFYMDVWGKGTTVTVSSGSASAPTLFPLVSSENS

SEQ ID NO: 1439 - protein, 126 aa, Homo sapiens
QVQLVQSGAEVKKPGASVKVSCKTSGYSFTGNYIHWVRQAPGQGLEWMGWINPNSGGSKSPQKFQGRVTMTRDTSVSTVYMELTRLKFDDTAIYYCTKDYGMLGSTLPEYFQHWGQGTLVTVSSRL

SEQ ID NO: 1440 - protein, 131 aa, Homo sapiens
QVQLVQSGAEVKKPGASVKVSCKASGYIFNNYFLHWVRQAPGQGLEWMGWINPNTAGTNYAYNFRGRVSMTRDTSTGTAYMELSRLRSDDTAVYFCASCERVVVGVTTLGRGGLRTPWTSWGQGTTVAVSS

SEQ ID NO: 1441 - protein, 140 aa, Homo sapiens
QVQLVQSGAEVKNPGASVKVSCKTSGYTFTVHYIHWVRQAPGQGLEWMGWINPNSGDTDYAQKFQGRVTMTRDTPINAAYLDLSRLRSDDTAVYYCARDRYYDSSGYPDAFDIWGQGTMVTVSSGSASAQPFPLVSSENS

SEQ ID NO: 1442 - protein, 124 aa, Homo sapiens
QVQLVQSGAEVKKPGASVMVSCKASGYTFIDYYIYWVRQAPGQGLEWMGWINPNRGGTKYAQKFQGRVTLTRDTAVTTAYLEVNSLRSDDTAVYYCARLQSLHGFYSNADYWGQGTLVTVSSRL

SEQ ID NO: 1443 - protein, 132 aa, Homo sapiens
QVQLVQSGAEVKKPGASVKVSCKASGYSFTTYSIYWVRQAPGQGPEWMGWISPNSGGTNYAQKFQGRVTMTRDTSINTAYMDLTRLTSDDTAMYYCTARPITGSAFDIWGQGTMVSVSSGMHPAQPFSPRLL

SEQ ID NO: 1444 - protein, 136 aa, Homo sapiens
QVQLVQSGAEVKKPGASVKVSCKASGYSFTTYSIYWVRQAPGQGPEWMGWINPNSGGTNYAQKFQGRVTMTGDTSINTAYMDLTRLTSDDTAMYYCTARPITGSAFDIWGQGTMVSVSSGSASAPTLFPSSPLRIP

SEQ ID NO: 1445 - protein, 121 aa, Homo sapiens
QVQLVQSGAEVKKPGASVMVSCKASGYTFIDYYIYWVRQAPGQGLEWMGWINPNRGGTKYAQKFQGRVTLTRDTAVTTAYLEVNSLRSDDTAVYYCARLQSLHGFYNADYWGQGTLVTVAS

SEQ ID NO: 1446 - protein, 160 aa, Homo sapiens
QVQLVQSGAEVKKPGASVMVSCKASGYTFIDYYIYWVRQAPGQGLEWMGWINPNRGGTKYAQKFQGRVTLTRDTAVTTAYLEVNSLRSDDTAVYYCARLQSLHGFYSNADYWGQGTLVTVSSASTKAHRSSPWHPPPRRTSGAQQPWAAWSRTTPEPVTV

SEQ ID NO: 1447 - protein, 115 aa, Homo sapiens
QVQLVQSGAEVKKPGASVKVSCQGSGYTFTDYYINWVRQAPGQGLEWMGWINSNSGGTSYAQKFQGRVTMTRDTSISTVYMELSGLTSDDTAVYYCARVSPPDVWGKGTTVTVSS

SEQ ID NO: 1448 - protein, 123 aa, Homo sapiens
QVQLVQSGAEVKKPGASVRVSCKASGYILSAYSMHWVRQAPGQGLEWMGWIKANSDGTNYAQKFFGRVTMTRDTSSSTAYMELTGLRSDDTAIYYCARAYGSYAEYCLHWGQGTLVTVSSRLH

SEQ ID NO: 1449 - protein, 123 aa, Homo sapiens
QVQLVQSGAEVKKPGASVKVSCQGSGYTFTDYYINWVRQAPGQGLEWMGWINSNSGGTSYAQKFQGRVTMTRDTSISTVYMELSGLTSDDTAVYYCARVSPPDVWGKGPRSPSLQPPPRPIGL

SEQ ID NO: 1450 - protein, 138 aa, Homo sapiens
QVQLVQSGAEVKKPGASVMVSCKASGYTFIDYYIYWVRQAPGQGLEWMGWINPNRGGTKYAQKFQGRVTLTRDTAVTTAYLEVNSLRSDDTAVYYCARLQSLHGFYSNADYWGQGTLVTVSSASTNGPIGLPPGHPPP

SEQ ID NO: 1451 - protein, 120 aa, Homo sapiens
QVQLVQSGAEVKKPGASVKVSCKASGYTFSGYYYIHWVRQAPGQGLEWMGRINPNTGGTDYAQKFQGRVTMTRDTSMNTLYLELSRLTSDDTAVYYCATIQRLVKDLDYWGQGTRGHRLL

SEQ ID NO: 1452 - protein, 121 aa, Homo sapiens
QVQLVQSGPEVKKPGASVKVSCKASGYTYNTYYMHWVRQAPGQGLEWMGWINPNSGGTNYAQRFQTRVDMTRDTSINTVYMELSGLTSDDTAVYYCVTDFERGYRFSTTWTSWGKGPRSSS

SEQ ID NO: 1453 - protein, 118 aa, Homo sapiens
QVQLVQSGAEVKKPGASVKVSCKASGYSFTGQYIHWVRQAPGQGLEWMGMINCNNGGTKIAQKFQGRVTLTRDTSISTAYMELSSLRSDDLAVYFCTRAIVGSEGDFWGQGTLVTVSS

SEQ ID NO: 1454 - protein, 125 aa, Homo sapiens
QVQLVQSGPEVKKPGASVKVSCKASGYTYNTYYMHWVRQAPGQGLEWMGWINPNSGGTNYAQRFQTRVDMTRDTSINTVYMELSGLTSDDTAVYYCVTDFNGGVFLYYFDHWGQGTLVTVSSAST

SEQ ID NO: 1455 - protein, 121 aa, Homo sapiens
QVQLVQSGAEMKKPGASVKVSCKSTGYSLTGYYMHWVRQAPGQGLEWMGWINPNNGATNYAQKFHDRVTMTRDTSISAVYMELNRLKSEDTAMLFLCETHGTPPLLFLTTWGQGTLVAVSS

SEQ ID NO: 1456 - protein, 120 aa, Homo sapiens
QVQLVQSGAEVKKPGASVKVSCQASGYTITTYDFNWVRQAPGQGLEWMGWINPHSGGTNYAQHFQGRVTMTRDTSINTVYMDLSRLTSDDTVLLFCARDNNWDRRQLVRPWGQGTLVTVS

SEQ ID NO: 1457 - protein, 119 aa, Homo sapiens
QVQLVQSGAEVKKPGASVKVSCKASGYIFAGYYMEWVRQTPGQGLEWMGWIDPRSGGTNYAQKFQGRVTLTRDTSLRTAYMELSSLRSDDTAVYYCATDNGSGIFWGKGTVVTVSAAST

SEQ ID NO: 1458 - protein, 126 aa, Homo sapiens
QVQLVQSGAEVKKPGASVKVSCKASGYSFSDYHIHWVRQAPGQGLEWMGWINQNGWWRNDMYRSSRAGSPPGDTSISTAFMELSRLRFDDTAIYYCARDYYDVLTTYSHYFFDLWGQGTLVTVIRG

SEQ ID NO: 1459 - protein, 123 aa, Homo sapiens
QVQLVQSGAEVKKPGASVKVSCKASGYTFTGYYMHWVRQAPGQGLEWMGWINPNSGGTNYAQKFQDRVTFTTDESKTTAYMELSSLRSEDSAVYYCAINTDSVATSLYSLGVWGQGTTVTVSS

SEQ ID NO: 1460 - DNA, 364 bp, homo sapiens
caggtgcagctggtgcagtctggggctgaggtgaagaagcctggggcctcagtgaaggtctcctgcaaggcttctggatacaccttcaccggctactatatgcactgggtgcgacaggcccctggacaagggcttgagtggatgggatggatcaaccctaacagtggtggcacaaactatgcacagaagtttcagggcagggtcaccatgaccagggacacgtccatcagcacagcctacatggagctgagcaggctgagatctgacgacacggccgtgtattactgtactaggggaaaaaactgtgattacgtttgggacttccagcactggggccagggcaccctggtcaccgtctcctcag

SEQ ID NO: 1461 - protein, 121 aa, homo sapiens
QVQLVQSGAEVKKPGASVKVSCKASGYTFTGYYMHWVRQAPGQGLEWMGWINPNSGGTNYAQKFQGRVTMTRDTSISTAYMELSRLRSDDTAVYYCTRGKNCDYVWDFQHWGQGTLVTVSS

SEQ ID NO: 1462 - DNA, 364 bp, homo sapiens
caggtgcagctggtgcagtctggggctgaggtgaagaagcctggggcctcagtgaaggtctcctgcaaggcttctggatacaccttcaccggctactatatgcactgggtgcgacaggcccctggacaagggcttgagtggatgggatggatcaaccctaacagtggtggcacaaactatgcacagaagtttcagggcagggtcaccatgaccagggacacgtccatcagcacagcctacatggagctgagcaggctgagatctgacgacacggccgtgtattactgtactaggggaaaaaactgtgattacgtttgggactttgactactggggccagggaaccctggtcaccgtctcctcag

SEQ ID NO: 1463 - protein, 121 aa, homo sapiens
QVQLVQSGAEVKKPGASVKVSCKASGYTFTGYYMHWVRQAPGQGLEWMGWINPNSGGTNYAQKFQGRVTMTRDTSISTAYMELSRLRSDDTAVYYCTRGKNCDYVWDFDYWGQGTLVTVSS

SEQ ID NO: 1464 - DNA, 364 bp, homo sapiens
caggtgcagctggtgcagtctggggctgaggtgaagaagcctggggcctcagtgaaggtctcctgcaaggcttctggatacaccttcaccggctactatatgcactgggtgcgacaggcccctggacaagggcttgagtggatgggatggatcaaccctaacagtggtggcacaaactatgcacagaagtttcagggcagggtcaccatgaccagggacacgtccatcagcacagcctacatggagctgagcaggctgagatctgacgacacggccgtgtattactgtactaggggaaaaaactatgattacgtttgggacttccagcactggggccagggcaccctggtcaccgtctcctcag

SEQ ID NO: 1465 - protein, 121 aa, homo sapiens
QVQLVQSGAEVKKPGASVKVSCKASGYTFTGYYMHWVRQAPGQGLEWMGWINPNSGGTNYAQKFQGRVTMTRDTSISTAYMELSRLRSDDTAVYYCTRGKNYDYVWDFQHWGQGTLVTVSS

SEQ ID NO: 1466 - DNA, 364 bp, homo sapiens
caggtgcagctggtgcagtctggggctgaggtgaagaagcctggggcctcagtgaaggtctcctgcaaggcttctggatacaccttcaccggctactatatgcactgggtgcgacaggcccctggacaagggcttgagtggatgggatggatcaaccctaacagtggtggcacaaactatgcacagaagtttcagggcagggtcaccatgaccagggacacgtccatcagcacagcctacatggagctgagcaggctgagatctgacgacacggccgtgtattactgtactaggggaaaaaattatgattacgtttgggacttccagcactggggccagggcaccctggtcaccgtctcctcag

SEQ ID NO: 1467 - protein, 121 aa, homo sapiens; identical to SEQ ID NO: 1465

SEQ ID NO: 1468 - DNA, 304 bp, homo sapiens
gaaattgtgttgacacagtctccagccaccctgtctttgtctccaggggaaagagccaccctctcctgcagggccagtcagagtgttagcttagcctggtaccaacagaaacctggccaggctcccaggctcctcatctatgatgcatccaacagggccactggcatcccagccaggttcagtggcagtgggtctgggacagacttcactctcaccatcagcagcctagagcctgaagattttgcagtttattactgtcagcagtatgaattttttggccaggggaccaagctggagatcaaac

SEQ ID NO: 1469 - protein, 101 aa, homo sapiens
EIVLTQSPATLSLSPGERATLSCRASQSVSLAWYQQKPGQAPRLLIYDASNRATGIPARFSGSGSGTDFTLTISSLEPEDFAVYYCQQYEFFGQGTKLEIK

SEQ ID NO: 1470 - DNA, 310 bp, homo sapiens
cattcagaaattgtgttgacacagtctccagccaccctgtctttgtctccaggggaaagagccaccctctcctgcagggccagtcagagtggctacttagcctggtaccaacagaaacctggccaggctcccaggctcctcatctatgatgcatccaacagggccactggcatcccagccaggttcagtggcagtgggtctgggacagacttcactctcaccatcagcagcctagagcctgaagattttgcagtttattactgtcagcagtatgaattttttggccaggggaccaagctggagatcaaac

SEQ ID NO: 1471 - protein, 103 aa, homo sapiens
HSEIVLTQSPATLSLSPGERATLSCRASQSGYLAWYQQKPGQAPRLLIYDASNRATGIPARFSGSGSGTDFTLTISSLEPEDFAVYYCQQYEFFGQGTKLEIK

SEQ ID NO: 1472 - DNA, 316 bp, homo sapiens
cattcagaaattgtgttgacacagtctccagccaccctgtctttgtctccaggggaaagagccaccctctcctgcagggccagtcagagtgttagcagctacttagcctggtaccaacagaaacctggccaggctcccaggctcctcatctatgatgcatccaacagggccactggcatcccagccaggttcagtggcagtgggtctgggacagacttcactctcaccatcagcagcctagagcctgaagattttgcagtttattactgtcagcagtatgaattttttggccaggggaccaagctggagatcaaac

SEQ ID NO: 1473 - protein, 103 aa, homo sapiens
EIVLTQSPATLSLSPGERATLSCRASQSVSSYLAWYQQKPGQAPRLLIYDASNRATGIPARFSGSGSGTDFTLTISSLEPEDFAVYYCQQYEFFGQGTKLEIK

SEQ ID NO: 1474 - DNA, 316 bp, homo sapiens
cattcagaaattgtgttgacacagtctccagccaccctgtctttgtctccaggggaaagagccaccctctcctgcagggccagtcagagtgttagcagctacttagcctggtaccaacagaaacctggccaggctcccaggctcctcatctatgatgcatccaacagggccactggcatcccagccaggttcagtggcagtgggtctgggacagacttcactctcaccatcagcagcctagagcctgaagattttgcagtttattactgtcagcagtatgaattttttggccaggggaccaaggtccaggtcgaca

SEQ ID NO: 1475 - protein, 103 aa, homo sapiens
EIVLTQSPATLSLSPGERATLSCRASQSVSSYLAWYQQKPGQAPRLLIYDASNRATGIPARFSGSGSGTDFTLTISSLEPEDFAVYYCQQYEFFGQGTKVQVD

SEQ ID NO: 1476 - DNA, 304 bp, homo sapiens
gaaattgtgttgacacagtctccagccaccctgtctttgtctccaggggaaagagccaccctctcctgcagggccagtcagagtgttagcttagcctggtaccaacagaaacctggccaggctcccaggctcctcatctatggtgcatccaccagggccactggcatcccagccaggttcagtggcagtgggtctgggacagagttcactctcaccatcagcagcctgcagtctgaagattttgcagtttattactgtcagcagtatgaattttttggccaggggaccaagctggagatcaaac

SEQ ID NO: 1477 - protein, 101 aa, homo sapiens
EIVLTQSPATLSLSPGERATLSCRASQSVSLAWYQQKPGQAPRLLIYGASTRATGIPARFSGSGSGTEFTLTISSLQSEDFAVYYCQQYEFFGQGTKLEIK

SEQ ID NO: 1478 - DNA, 310 bp, homo sapiens
cattcagaaattgtgttgacacagtctccagccaccctgtctttgtctccaggggaaagagccaccctctcctgcagggccagtcagagtggctacttagcctggtaccaacagaaacctggccaggctcccaggctcctcatctatggtgcatccaccagggccactggcatcccagccaggttcagtggcagtgggtctgggacagagttcactctcaccatcagcagcctgcagtctgaagattttgcagtttattactgtcagcagtatgaattttttggccaggggaccaagctggagatcaaac

SEQ ID NO: 1479 - protein, 103 aa, homo sapiens
HSEIVLTQSPATLSLSPGERATLSCRASQSGYLAWYQQKPGQAPRLLIYGASTRATGIPARFSGSGSGTEFTLTISSLQSEDFAVYYCQQYEFFGQGTKLEIK

SEQ ID NO: 1480 - DNA, 316 bp, homo sapiens
cattcagaaattgtgttgacacagtctccagccaccctgtctttgtctccaggggaaagagccaccctctcctgcagggccagtcagagtgttagcagctacttagcctggtaccaacagaaacctggccaggctcccaggctcctcatctatggtgcatccaccagggccactggcatcccagccaggttcagtggcagtgggtctgggacagagttcactctcaccatcagcagcctgcagtctgaagattttgcagtttattactgtcagcagtatgaattttttggccaggggaccaagctggagatcaaac

SEQ ID NO: 1481 - protein, 103 aa, homo sapiens
EIVLTQSPATLSLSPGERATLSCRASQSVSSYLAWYQQKPGQAPRLLIYGASTRATGIPARFSGSGSGTEFTLTISSLQSEDFAVYYCQQYEFFGQGTKLEIK

SEQ ID NO: 1482 - DNA, 316 bp, homo sapiens
cattcagaaattgtgttgacacagtctccagccaccctgtctttgtctccaggggaaagagccaccctctcctgcagggccagtcagagtgttagcagctacttagcctggtaccaacagaaacctggccaggctcccaggctcctcatctatggtgcatccaccagggccactggcatcccagccaggttcagtggcagtgggtctgggacagagttcactctcaccatcagcagcctgcagtctgaagattttgcagtttattactgtcagcagtatgaattttttggccaggggaccaaggtccaggtcgaca

SEQ ID NO: 1483 - protein, 103 aa, homo sapiens
EIVLTQSPATLSLSPGERATLSCRASQSVSSYLAWYQQKPGQAPRLLIYGASTRATGIPARFSGSGSGTEFTLTISSLQSEDFAVYYCQQYEFFGQGTKVQVD

SEQ ID NO: 1484 - DNA, 391 bp, homo sapiens
caggtgcagctggtgcagtctggggctgaggtgaagaagcctggggcctcagtgaaggtctcctgcaaggcttctggatacaccttcaccggctactatatgcactgggtgcgacaggcccctggacaagggcttgagtggatgggatggatcaaccctaacagtggtggcacaaactatgcacagaagtttcagggcagggtcaccatgactcgacaattatctcaagaccccagggacacgtccatcagcacagcctacatggagctgagcaggctgagatctgacgacacggccgtgtattactgtgtccggagagggtcctgtggttattgcggagactttccctggcaatactggggccagggcaccctggtcaccgtctcctcag

SEQ ID NO: 1485 - protein, 127 aa, homo sapiens
QVQLVQSGAEVKKPGASVKVSCKASGYTFTGYYMHWVTGPWTRAVDGMDQPQWWHKLCTEVSGQGHHDSQLSQDPRDTSISTAYMELSRLRSDDTAVYYCVRRGSCGYCGDFPWQYWGQGTLVTVSS

SEQ ID NO: 1486 - DNA, 391 bp, homo sapiens
caggtgcagctggtgcagtctggggctgaggtgaagaagcctggggcctcagtgaaggtctcctgcaaggcttctggatacaccttcaccggctactatatgcactgggtgcgacaggcccctggacaagggcttgagtggatgggatggatcaaccctaacagtggtggcacaaactatgcacagaagtttcagggcagggtcaccatgactcgacaattatctcaagaccccagggacacgtccatcagcacagcctacatggagctgagcaggctgagatctgacgacacggccgtgtattactgtgtccggagagggtcctatgattattgcggagactttccctggcaatactggggccagggcaccctggtcaccgtctcctcag

SEQ ID NO: 1487 - protein, 127 aa, homo sapiens
QVQLVQSGAEVKKPGASVKVSCKASGYTFTGYYMHWVTGPWTRAVDGMDQPQWWHKLCTEVSGQGHHDSQLSQDPRDTSISTAYMELSRLRSDDTAVYYCVRRGSYDYCGDFPWQYWGQGTLVTVSS

SEQ ID NO: 1488 - DNA, 370 bp, homo sapiens
caggtgcagctggtgcagtctggggctgaggtgaagaagcctggggcctcagtgaaggtctcctgcaaggcttctggatacaccttcaccggctactatatgcactgggtgcgacaggcccctggacaagggcttgagtggatgggatggatcaaccctaacagtggtggcacaaactatgcacagaagtttcagggcagggtcaccagtaccagggacacgtccatcagcacagcctacatggagctgagcaggctgagatctgacgacacggccgtgtattactgtgtccggagagggtcctatgattattgcggagactttccctggcaatactggggccagggcaccctggtcaccgtctcctcag

SEQ ID NO: 1489 - protein, 123 aa, homo sapiens
QVQLVQSGAEVKKPGASVKVSCKASGYTFTGYYMHWVRQAPGQGLEWMGWINPNSGGTNYAQKFQGRVTSTRDTSISTAYMELSRLRSDDTAVYYCVRRGSYDYCGDFPWQYWGQGTLVTVSS

SEQ ID NO: 1490 - DNA, 307 bp, homo sapiens
gaaattgtgttgacgcagtctccaggcaccctgtctttgtctccaggggaaagagccaccctctcctgcagggccagtcagagtgttagcagcttagcctggtaccagcagaaacctggccaggctcccaggctcctcatctatggtgcatccagcagggccactggcatcccagacaggttcagtggcagtgggtctgggacagacttcactctcaccatcagcagactggagcctgaagattttgcagtgtattactgtcaacaatttgaattttttggccaggggaccaagctggagatcaaac

SEQ ID NO: 1491 - protein, 102 aa, homo sapiens
EIVLTQSPGTLSLSPGERATLSCRASQSVSSLAWYQQKPGQAPRLLIYGASSRATGIPDRFSGSGSGTDFTLTISRLEPEDFAVYYCQQFEFFGQGTKLEIK

SEQ ID NO: 1492 - DNA, 307 bp, homo sapiens
gaaattgtgttgacgcagtctccaggcaccctgtctttgtctccaggggaaagagccaccctctcctgcagggccagtcagagtggcagctacttagcctggtaccagcagaaacctggccaggctcccaggctcctcatctatggtgcatccagcagggccactggcatcccagacaggttcagtggcagtgggtctgggacagacttcactctcaccatcagcagactggagcctgaagattttgcagtgtattactgtcaacaatttgaattttttggccaggggaccaagctggagatcaaac

SEQ ID NO: 1493 - protein, 102 aa, homo sapiens
EIVLTQSPGTLSLSPGERATLSCRASQSGSYLAWYQQKPGQAPRLLIYGASSRATGIPDRFSGSGSGTDFTLTISRLEPEDFAVYYCQQFEFFGQGTKLEIK

SEQ ID NO: 1494 - DNA, 313 bp, homo sapiens
gaaattgtgttgacgcagtctccaggcaccctgtctttgtctccaggggaaagagccaccctctcctgcagggccagtcagagtgttagcagcagctacttagcctggtaccagcagaaacctggccaggctcccaggctcctcatctatggtgcatccagcagggccactggcatcccagacaggttcagtggcagtgggtctgggacagacttcactctcaccatcagcagactggagcctgaagattttgcagtgtattactgtcaacaatttgaattttttggccaggggaccaagctggagatcaaac

SEQ ID NO: 1495 - protein, 104 aa, homo sapiens
EIVLTQSPGTLSLSPGERATLSCRASQSVSSSYLAWYQQKPGQAPRLLIYGASSRATGIPDRFSGSGSGTDFTLTISRLEPEDFAVYYCQQFEFFGQGTKLEIK

SEQ ID NO: 1496 - DNA, 313 bp, homo sapiens
gaaattgtgttgacgcagtctccagccaccctgtctttgtctccaggggaaagagccaccctctcctgcagggccagtcagagtgttagcagcagctacttagcctggtaccagcagaaacctggccaggctcccaggctcctcatctatgatgcatccagcagggccactggcatcccagacaggttcagtggcagtgggtctgggacagacttcactctcaccatcagcagactggagcctgaagattttgcagtctattactgtcaacaatttgaattttttggccaggggaccaagctggagatcaaac

SEQ ID NO: 1497 - protein, 104 aa, homo sapiens
EIVLTQSPATLSLSPGERATLSCRASQSVSSSYLAWYQQKPGQAPRLLIYDASSRATGIPDRFSGSGSGTDFTLTISRLEPEDFAVYYCQQFEFFGQGTKLEIK

SEQ ID NO: 1498 - DNA, 307 bp, homo sapiens
gaaattgtgttgacgcagtctccagccaccctgtctttgtctccaggggaaagagccaccctctcctgcagggccagtcagagtggcagctacttagcctggtaccagcagaaacctggccaggctcccaggctcctcatctatgatgcatccagcagggccactggcatcccagacaggttcagtggcagtgggtctgggacagacttcactctcaccatcagcagactggagcctgaagattttgcagtctattactgtcaacaatttgaattttttggccaggggaccaagctggagatcaaac

SEQ ID NO: 1499 - protein, 102 aa, homo sapiens
EIVLTQSPATLSLSPGERATLSCRASQSGSYLAWYQQKPGQAPRLLIYDASSRATGIPDRFSGSGSGTDFTLTISRLEPEDFAVYYCQQFEFFGQGTKLEIK

SEQ ID NO: 1500 - protein, 593 aa, homo sapiens
MGWSCIILFLVATATGVHSQVQLVQSGAEVKKPGASVKVSCKASGYTFTGYYMHWVRQAPGQGLEWMGWINPNSGGTNYAQKFQGRVTMTRDTSISTAYMELSRLRSDDTAVYYCAREKNCDYNWDFEHWGRGTPVIVSSGSASAPTLFPLVSCENSPSDTSSVAVGCLAQDFLPDSITFSWKYKNNSDISSTRGFPSVLRGGKYAATSQVLLPSKDVMQGTDEHVVCKVQHPNGNKEKNVPLPVIAELPPKVSVFVPPRDGFFGNPRKSKLICQATGFSPRQIQVSWLREGKQVGSGVTTDQVQAEAKESGPTTYKVTSTLTIKESDWLSQSMFTCRVDHRGLTFQQNASSMCVPDQDTAIRVFAIPPSFASIFLTKSTKLTCLVTDLTTYDSVTISWTRQNGEAVKTHTNISESHPNATFSAVGEASICEDDWNSGERFTCTVTHTDLPSPLKQTISRPKGVALHRPDVYLLPPAREQLNLRESATITCLVTGFSPADVFVQWMQRGQPLSPEKYVTSAPMPEPQAPGRYFAHSILTVSEEEWNTGETYTCVVAHEALPNRVTERTVDKSTGKPTLYNVSLVMSDTAGTCY

SEQ ID NO: 1501 - DNA, 1782 bp, homo sapiens
atgggatggtcatgtatcatcctttttctagtagcaactgcaaccggtgtacattcccaggtgcagctggtgcagtctggggctgaggtgaagaagcctggggcctcagtgaaggtctcctgcaaggcttctggatacaccttcaccggctactatatgcactgggtgcgacaggcccctggacaagggcttgagtggatgggatggatcaaccctaacagtggtggcacaaactatgcacagaagtttcagggcagggtcaccatgaccagggacacgtccatcagcacagcctacatggagctgagcaggctgagatctgacgacacggccgtgtattactgtgcgagagaaaaaaactgtgattacaattgggacttcgaacactggggccggggcaccccggtcatcgtctcatcagggagtgcatccgccccaacccttttccccctcgtctcctgtgagaattccccgtcggatacgagcagcgtggccgttggctgcctcgcacaggacttccttcccgactccatcactttctcctggaaatacaagaacaactctgacatcagcagcacccggggcttcccatcagtcctgagagggggcaagtacgcagccacctcacaggtgctgctgccttccaaggacgtcatgcagggcacagacgaacacgtggtgtgcaaagtccagcaccccaacggcaacaaagaaaagaacgtgcctcttccagtgattgccgagctgcctcccaaagtgagcgtcttcgtcccaccccgcgacggcttcttcggcaacccccgcaagtccaagctcatctgccaggccacgggtttcagtccccggcagattcaggtgtcctggctgcgcgaggggaagcaggtggggtctggcgtcaccacggaccaggtgcaggctgaggccaaagagtctgggcccacgacctacaaggtgaccagcacactgaccatcaaagagagcgactggctcagccagagcatgttcacctgccgcgtggatcacaggggcctgaccttccagcagaatgcgtcctccatgtgtgtccccgatcaagacacagccatccgggtcttcgccatccccccatcctttgccagcatcttcctcaccaagtccaccaagttgacctgcctggtcacagacctgaccacctatgacagcgtgaccatctcctggacccgccagaatggcgaagctgtgaaaacccacaccaacatctccgagagccaccccaatgccactttcagcgccgtgggtgaggccagcatctgcgaggatgactggaattccggggagaggttcacgtgcaccgtgacccacacagacctgccctcgccactgaagcagaccatctcccggcccaagggggtggccctgcacaggcccgatgtctacttgctgccaccagcccgggagcagctgaacctgcgggagtcggccaccatcacgtgcctggtgacgggcttctctcccgcggacgtcttcgtgcagtggatgcagagggggcagcccttgtccccggagaagtatgtgaccagcgccccaatgcctgagccccaggccccaggccggtacttcgcccacagcatcctgaccgtgtccgaagaggaatggaacacgggggagacctacacctgcgtggtggcccatgaggccctgcccaacagggtcaccgagaggaccgtggacaagtccaccggtaaacccaccctgtacaacgtgtccctggtcatgtccgacacagctggcacctgctactga

SEQ ID NO: 1502 - protein, 159 aa, homo sapiens
MKNHLLFWGVLAVFIKAVHVKAQEDERIVLVDNKCKCARITSRIIRSSEDPNEDIVERNIRIIVPLNNRENISDPTSPLRTRFVYHLSDLCKKCDPTEVELDNQIVTATQSNICDEDSATETCYTYDRNKCYTAVVPLVYGGETKMVETALTPDACYPD

SEQ ID NO: 1503 - DNA, 480 bp, homo sapiens
atgaagaaccatttgcttttctggggagtcctggcggtttttattaaggctgttcatgtgaaagcccaagaagatgaaaggattgttcttgttgacaacaaatgtaagtgtgcccggattacttccaggatcatccgttcttccgaagatcctaatgaggacattgtggagagaaacatccgaattattgttcctctgaacaacagggagaatatctctgatcccacctcaccattgagaaccagatttgtgtaccatttgtctgacctctgtaaaaaatgtgatcctacagaagtggagctggataatcagatagttactgctacccagagcaatatctgtgatgaagacagtgctacagagacctgctacacttatgacagaaacaagtgctacacagctgtggtcccactcgtatatggtggtgagaccaaaatggtggaaacagccttaaccccagatgcctgctatcctgactaa

SEQ ID NO: 1504 - protein, 470 aa, homo sapiens
MGWSCIILFLVATATGVHSQVQLVQSGGQMKKPGESMRISCRASGYEFIDCTLNWIRLAPGKRPEWMGWLKPRGGAVNYARPLQGRVTMTRDVYSDTAFLELRSLTVDDTAVYFCTRGKNCDYNWDFEHWGRGTPVIVSSPSTKGPSVFPLAPSSKSTSGGTAALGCLVKDYFPEPVTVSWNSGALTSGVHTFPAVLQSSGLYSLSSVVTVPSSSLGTQTYICNVNHKPSNTKVDKKVEPKSCDKTHTCPPCPAPELLGGPDVFLFPPKPKDTLMISRTPEVTCVVVDVSHEDPEVKFNWYVDGVEVHNAKTKPREEQYNSTYRVVSVLTVLHQDWLNGKEYKCKVSNKALPAPEEKTISKAKGQPREPQVYTLPPSRDELTKNQVSLTCLVKGFYPSDIAVEWESNGQPENNYKTTPPVLDSDGSFFLYSKLTVDKSRWQQGNVFSCSVMHEALHNHYTQKSLSLSPGK

SEQ ID NO: 1505 - DNA, 1413 bp, homo sapiens
atgggatggtcatgtatcatcctttttctagtagcaactgcaaccggtgtacattcccaggtgcagctggtgcagtctggaggtcagatgaagaagcctggcgagtcgatgagaatttcttgtcgggcttctggatatgaatttattgattgtacgctaaattggattcgtctggcccccggaaaaaggcctgagtggatgggatggctgaagcctcgggggggggccgtcaactacgcacgtccacttcagggcagagtgaccatgactcgagacgtttattccgacacagcctttttggagctgcgctcgttgacagtagacgacacggccgtctacttttgtactaggggaaaaaactgtgattacaattgggacttcgaacactggggccggggcaccccggtcatcgtctcatcaccgtcgaccaagggcccatcggtcttccccctggcaccctcctccaagagcacctctgggggcacagcggccctgggctgcctggtcaaggactacttccccgaaccggtgacggtgtcgtggaactcaggcgccctgaccagcggcgtgcacaccttcccggctgtcctacagtcctcaggactctactccctcagcagcgtggtgaccgtgccctccagcagcttgggcacccagacctacatctgcaacgtgaatcacaagcccagcaacaccaaggtggacaagaaagttgagcccaaatcttgtgacaaaactcacacatgcccaccgtgcccagcacctgaactcctggggggaccggatgtcttcctcttccccccaaaacccaaggacaccctcatgatctcccggacccctgaggtcacatgcgtggtggtggacgtgagccacgaagaccctgaggtcaagttcaactggtacgtggacggcgtggaggtgcataatgccaagacaaagccgcgggaggagcagtacaacagcacgtaccgtgtggtcagcgtcctcaccgtcctgcaccaggactggctgaatggcaaggagtacaagtgcaaggtctccaacaaagccctcccagcccccgaggagaaaaccatctccaaagccaaagggcagccccgagaaccacaggtgtacaccctgcccccatcccgggatgagctgaccaagaaccaggtcagcctgacctgcctggtcaaaggcttctatcccagcgacatcgccgtggagtgggagagcaatgggcagccggagaacaactacaagaccacgcctcccgtgctggactccgacggctccttcttcctctacagcaagctcaccgtggacaagagcaggtggcagcaggggaacgtcttctcatgctccgtgatgcatgaggctctgcacaaccactacacgcagaagagcctctccctgtctccgggtaaatga
